(19) United States
(12) Patent Application Publication
(10) Pub. No.: US 2025/0136710 A1
(43) Pub. Date: May 1, 2025

(54) TRIPLE COMBINATION ANTIBODY THERAPIES

(71) Applicant: Compugen Ltd., Holon (IL)

(72) Inventors: Spencer Liang, Belmont, CA (US); Ling Leung, Foster City, CA (US); Sarah Whelan, Mountain View, CA (US); Maya Kotturi, Belmont, CA (US); Eran Ophir, Yehuda (IL); Arthur Machlenkin, Givaat Brener (IL); Zoya Alteber, Nes Ziyona (IL); Meir Azulay, Givatayim (IL); Sandeep Kumar, San Bruno, CA (US); Radhika Desai, Brisbane, CA (US); Christopher Chan, South San Francisco, CA (US); Kathryn Logronio, Pleasanton, CA (US)

(21) Appl. No.: 18/774,872

(22) Filed: Jul. 16, 2024

Related U.S. Application Data
(63) Continuation of application No. 17/544,852, filed on Dec. 7, 2021, now Pat. No. 12,152,084.
Application No. 17/544,852 is a continuation of application No. 15/996,369, filed on Jun. 1, 2018, now Pat. No. 11,225,523.
(60) Provisional application No. 62/618,005, filed on Jan. 16, 2018.
(60) Provisional application No. 62/582,756, filed on Nov. 7, 2017.
(60) Provisional application No. 62/547,051, filed on Aug. 17, 2017.
(60) Provisional application No. 62/538,563, filed on Jul. 28, 2017.
(60) Provisional application No. 62/515,452, filed on Jun. 5, 2017.
(60) Provisional application No. 62/513,960, filed on Jun. 1, 2017.

(51) Int. Cl. C07K 16/30; A61K 38/17; A61K 39/395; A61P 35/00; C07K 16/24; C07K 16/28; C07K 16/42; G01N 33/574

(52) U.S. Cl. CPC C07K 16/3061; A61K 39/395; A61P 35/00; C07K 16/28; C07K 16/2803; A61K 38/1709; A61K 2300/00; C07K 16/24; C07K 16/2875; C07K 16/4283; G01N 33/57484

(57) ABSTRACT

The present invention is directed to triple combination therapies with anti-TIGIT antibodies, anti-PVRIG antibodies, and checkpoint inhibitors, including anti-PD-1 or anti-PD-L1 antibodies.

### CROSS REFERENCE TO RELATED APPLICATIONS

[0001] This application is a continuation of U.S. patent application Ser. No. 17/544,852 filed Dec. 7, 2021 which is a continuation of U.S. patent application Ser. No. 15/996,369 (now U.S. Pat. No. 11,225,523) filed Jun. 1, 2018 which claims priority under 35 U.S.C. § 119 to U.S. Patent Application Nos. 62/513,960 filed Jun. 1, 2017, 62/515,452 filed Jun. 5, 2017, 62/538,563 filed Jul. 28, 2017, 62/547,051 filed Aug. 17, 2017, 62/582,756 filed Nov. 7, 2017 and 62/618,005 filed Jan. 16, 2018, all of which are expressly incorporated herein by reference in their entireties.

### SEQUENCE LISTING

[0002] The instant application contains a Sequence Listing which has been submitted electronically in XML format and is hereby incorporated by reference in its entirety. Said XML copy, created on Sep. 13, 2024, is named 1143865009US02_SL.xml and is 2471000 bytes in size.

### I. BACKGROUND OF THE INVENTION

[0003] TIGIT is a coinhibitory receptor that is highly expressed on effector & regulatory (Treg) CD4+ T cells, effector CD8+ T cells, and NK cells. TIGIT has been shown to attenuate immune response by (1) direct signaling, (2) inducing ligand signaling, and (3) competition with and disruption of signaling by the costimulatory receptor CD226 (also known as DNAM-1). TIGIT signaling has been the most well-studied in NK cells, where it has been demonstrated that engagement with its cognate ligand, poliovirus receptor (PVR, also known as CD155) directly suppresses NK cell cytotoxicity through its cytoplasmic ITIM domain. Knockout of the TIGIT gene or antibody blockade of the TIGIT/PVR interaction has shown to enhance NK cell killing in vitro, as well as to exacerbate autoimmune diseases in vivo. In addition to its direct effects on T- and NK cells, TIGIT can induce PVR-mediated signaling in dendritic or tumor cells, leading to the increase in production of anti-inflammatory cytokines such as IL10. In T-cells TIGIT can also inhibit lymphocyte responses by disrupting homodimerization of the costimulatory receptor CD226, and by competing with it for binding to PVR.

[0004] TIGIT is highly expressed on lymphocytes, including Tumor Infiltrating Lymphocytes (TILs) and Tregs, that infiltrate different types of tumors. PVR is also broadly expressed in tumors, suggesting that the TIGIT-PVR signaling axis may be a dominant immune escape mechanism for cancer. Notably, TIGIT expression is tightly correlated with the expression of another important coinhibitory receptor, PD1. TIGIT and PD1 are co-expressed on the TILs of numerous human and murine tumors. Unlike TIGIT and CTLA4, PD1 inhibition of T cell responses does not involve competition for ligand binding with a costimulatory receptor.

[0005] The immune checkpoint, poliovirus receptor related immunoglobulin domain containing (PVRIG, also known as CD112R) represents a new inhibitory receptor within the TIGIT family of receptors. PVRIG binds with high affinity to its cognate ligand, poliovirus receptor-related 2 (PVRL2, also known as CD112 or nectin-2) to deliver an inhibitory signal through its ITIM motif within T and NK cells. The affinity of TIGIT to PVR and of PVRIG to PVRL2 is higher than the affinity of CD226 to either PVR or PVRL2, suggesting TIGIT and PVRIG can outcompete PVR and PVRL2 from CD226 and providing an indirect mechanism by which TIGIT and PVRIG can reduce lymphocyte function. Thus, two receptors with the same family, TIGIT and PVRIG, deliver inhibitory signals to dampen T and NK cell responses.

[0006] Accordingly, TIGIT and PVRIG are attractive for triple therapy combinations with checkpoint inhibitors, including anti-PD-1 antibodies.

### II. BRIEF SUMMARY OF THE INVENTION

[0007] The present invention provides methods and compositions comprising combinations of the TIGIT antibodies as disclosed herein and as provided in the claims with PVRIG antibodies and checkpoint inhibitors, including anti-PD-1 antibodies. The present invention also provides for nucleic acids encoding said antibodies and compositions thereof.

[0008] The present invention provides a method of treating cancer said patient comprising: a) providing a biopsy from said patient comprising tumor cells; b) measuring the frequency of PD-L1 positive tumor cells or immune cells in said biopsy; c) if said frequency of PD-L1 positive tumor cells or immune cells is greater than 1% compared to staining the same tumor cells with a relevant isotype control antibody for the antibodies used, administering a triple combination therapy comprising an anti-TIGIT antibody, an anti-PVRIG antibody and an anti-PD-1 antibody; and d) if said frequency of PD-L1 positive tumor cells or immune cells is less than 1% compared to staining the same tumor cells with a relevant isotype control antibody for the antibodies used, administering a double combination therapy comprising an anti-TIGIT antibody and an anti-PVRIG antibody.

[0009] In some embodiments of the method, anti-TIGIT antibody is an antibody chosen from at least one of CPA.9.083.H4(S241P), CPA.9.086.H4(S241P), CHA.9.547.7.H4(S241P) and CHA.9.547.13.H4(S241P).

[0010] In some embodiments of the method, anti-PVRIG antibody is an antibody chosen from at least one of CHA.7.518.1.H4(S241P) and CHA.7.538.1.2.H4(S241P).

[0011] In some embodiments of the method, the anti-PD-1 antibody is an antibody chosen from at least one of pembrolizumab, cemiplimab, and nivolumab.

[0012] In some embodiments of the method, the double combination therapy is chosen from the administration of CPA.9.083.H4(S241P) and CHA.7.518.1.H4(S241P); CPA.9.086.H4(S241P) and CHA.7.518.1.H4(S241P); CHA.9.547.7.H4(S241P) and CHA.7.518.1.H4(S241P); CHA.9.547.13.H4(S241P) and CHA.7.518.1.H4(S241P); CPA.9.083.H4(S241P) and CHA.7.538.1.2.H4(S241P); CPA.9.086.H4(S241P) and CHA.7.538.1.2.H4(S241P); CHA.9.547.7.H4(S241P) and CHA.7.538.1.2.H4(S241P); and CHA.9.547.13.H4(S241P) and CHA.7.538.1.2.H4(S241P).

[0013] In some embodiments of the method, the triple combination therapy is chosen from the administration of CPA.9.083.H4(S241P), pembrolizumab and CHA.7.518.1.H4(S241P); CPA.9.086.H4(S241P), pembrolizumab and CHA.7.518.1.H4(S241P); CHA.9.547.7.H4(S241P), pembrolizumab and CHA.7.518.1.H4(S241P); CHA.9.547.13.H4(S241P), pembrolizumab and CHA.7.518.1.H4(S241P); CPA.9.083.H4(S241P), pembrolizumab and CHA.7.538.1.2.H4(S241P); CPA.9.086.H4(S241P), pembrolizumab and CHA.7.538.1.2.H4(S241P); CHA.9.547.7.H4(S241P), pembrolizumab and CHA.7.538.1.2.H4(S241P); CHA.9.547.13.H4(S241P), pembrolizumab and CHA.7.538.1.2.H4(S241P); CPA.9.083.H4(S241P), nivolumab and CHA.7.518.1.H4(S241P); CPA.9.086.H4(S241P), nivolumab and CHA.7.518.1.H4(S241P); CHA.9.547.7.H4(S241P), nivolumab and CHA.7.518.1.H4(S241P); CHA.9.547.13.H4(S241P), nivolumab and CHA.7.518.1.H4(S241P); CPA.9.083.H4(S241P), nivolumab and CHA.7.538.1.2.H4(S241P); CPA.9.086.H4(S241P), nivolumab and CHA.7.538.1.2.H4(S241P); CHA.9.547.7.H4(S241P, nivolumab and CHA.7.538.1.2.H4(S241P); CHA.9.547.13.H4(S241P), nivolumab and CHA.7.538.1.2.H4(S241P); CHA.7.538.1.2.H4(S241P); CPA.9.083.H4(S241P), cemiplimab and CHA.7.518.1.H4(S241P); CPA.9.086.H4(S241P), cemiplimab and CHA.7.518.1.H4(S241P); CHA.9.547.7.H4(S241P), cemiplimab and CHA.7.518.1.H4(S241P); CHA.9.547.13.H4(S241P), cemiplimab and CHA.7.518.1.H4(S241P); CPA.9.083.H4(S241P), cemiplimab and CHA.7.538.1.2.H4(S241P); CPA.9.086.H4(S241P), cemiplimab and CHA.7.538.1.2.H4(S241P); CHA.9.547.7.H4(S241P, cemiplimab and CHA.7.538.1.2.H4(S241P); and CHA.9.547.13.H4(S241P), cemiplimab and CHA.7.538.1.2.H4(S241P).

[0014] In some embodiments of the method, the antibodies are administered simultaneously.

[0015] In some embodiments of the method, the antibodies are administered sequentially.

[0016] In some embodiments of the method, the cancer is selected from the group consisting of prostate cancer, liver cancer (HCC), colorectal cancer, ovarian cancer, endometrial cancer, breast cancer, triple negative breast cancer, pancreatic cancer, stomach (gastric) cancer, cervical cancer, head and neck cancer, thyroid cancer, testis cancer, urothelial cancer, lung cancer (small cell lung, non-small cell lung), melanoma, non melanoma skin cancer (squamous and basal cell carcinoma), glioma, renal cancer (RCC), lymphoma (NHL or HL), Acute myeloid leukemia (AML), T cell Acute Lymphoblastic Leukemia (T-ALL), Diffuse Large B cell lymphoma, testicular germ cell tumors, mesothelioma, esophageal cancer, Merkel Cells cancer, MSI-high cancer, KRAS mutant tumors, adult T-cell leukemia/lymphoma, and Myelodysplastic syndromes (MDS). In some embodiments of the method, the cancer is selected from the group consisting of cancer triple negative breast cancer, stomach (gastric) cancer, lung cancer (small cell lung, non-small cell lung), Merkel Cells cancer, MSI-high cancer, KRAS mutant tumors, adult T-cell leukemia/lymphoma, and Myelodysplastic syndromes (MDS). In some embodiments of the method, the cancer is selected from the group consisting of cancer triple negative breast cancer, stomach (gastric) cancer, lung cancer (small cell lung, non-small cell lung), Merkel Cells cancer, and MSI-high cancer.

[0017] The present invention also provides a method of treating cancer said patient comprising administering a triple combination therapy comprising an anti-TIGIT antibody, an anti-PVRIG antibody, and an anti-PD-1 antibody.

[0018] In some embodiments of the method, the anti-TIGIT antibody is an antibody chosen from at least one of CPA.9.083.H4(S241P), CPA.9.086.H4(S241P), CHA.9.547.7.H4(S241P), and CHA.9.547.13.H4(S241P).

[0019] In some embodiments of the method, the anti-PVRIG antibody is an antibody chosen from at least one of CHA.7.518.1.H4(S241P) and CHA.7.538.1.2.H4(S241P).

[0020] In some embodiments of the method, the anti-PD-1 antibody is an antibody chosen from at least one of pembrolizumab, cemiplimab and nivolumab.

[0021] In some embodiments of the method, the triple combination therapy comprises the administration of an anti-PD-1 antibody in combination with a double-combination therapy chosen from the administration of CPA.9.083.H4(S241P) and CHA.7.518.1.H4(S241P); CPA.9.086.H4(S241P) and CHA.7.518.1.H4(S241P); CHA.9.547.7.H4(S241P) and CHA.7.518.1.H4(S241P); CHA.9.547.13.H4(S241P) and CHA.7.518.1.H4(S241P); CPA.9.083.H4(S241P) and CHA.7.538.1.2.H4(S241P); CPA.9.086.H4(S241P) and CHA.7.538.1.2.H4(S241P); CHA.9.547.7.H4(S241P) and CHA.7.538.1.2.H4(S241P); and CHA.9.547.13.H4(S241P) and CHA.7.538.1.2.H4(S241P).

[0022] In some embodiments of the method, the triple combination therapy is chosen from the administration of CPA.9.083.H4(S241P), pembrolizumab and CHA.7.518.1.H4(S241P); CPA.9.086.H4(S241P), pembrolizumab and CHA.7.518.1.H4(S241P); CHA.9.547.7.H4(S241P), pembrolizumab and CHA.7.518.1.H4(S241P); CHA.9.547.13.H4(S241P), pembrolizumab and CHA.7.518.1.H4(S241P); CPA.9.083.H4(S241P), pembrolizumab and CHA.7.538.1.2.H4(S241P); CPA.9.086.H4(S241P), pembrolizumab and CHA.7.538.1.2.H4(S241P); CHA.9.547.7.H4(S241P), pembrolizumab and CHA.7.538.1.2.H4(S241P); CHA.9.547.13.H4(S241P), pembrolizumab and CHA.7.538.1.2.H4(S241P); CPA.9.083.H4(S241P), nivolumab and CHA.7.518.1.H4(S241P); CPA.9.086.H4(S241P), nivolumab and CHA.7.518.1.H4(S241P); CHA.9.547.7.H4(S241P), nivolumab and CHA.7.518.1.H4(S241P); CHA.9.547.13.H4(S241P), nivolumab and CHA.7.518.1.H4(S241P); CPA.9.083.H4(S241P), nivolumab and CHA.7.538.1.2.H4(S241P); CPA.9.086.H4(S241P), nivolumab and CHA.7.538.1.2.H4(S241P); CHA.9.547.7.H4(S241P, nivolumab and CHA.7.538.1.2.H4(S241P); CHA.9.547.13.H4(S241P), nivolumab and CHA.7.538.1.2.H4(S241P); CHA.7.538.1.2.H4(S241P); CPA.9.083.H4(S241P), cemiplimab and CHA.7.518.1.H4(S241P); CPA.9.086.H4(S241P), cemiplimab and CHA.7.518.1.H4(S241P); CHA.9.547.7.H4(S241P), cemiplimab and CHA.7.518.1.H4(S241P); CHA.9.547.13.H4(S241P), cemiplimab and CHA.7.518.1.H4(S241P); CPA.9.083.H4(S241P), cemiplimab and CHA.7.538.1.2.H4(S241P); CPA.9.086.H4(S241P), cemiplimab and CHA.7.538.1.2.H4(S241P); CHA.9.547.7.H4(S241P, cemiplimab and CHA.7.538.1.2.H4(S241P); and CHA.9.547.13.H4(S241P), cemiplimab and CHA.7.538.1.2.H4(S241P).

[0023] In some embodiments of the method, the antibodies are administered simultaneously.

[0024] In some embodiments of the method, the antibodies are administered sequentially.

[0025] In some embodiments of the method, the cancer for the triple combination therapy is selected from the group consisting of prostate cancer, liver cancer (HCC), colorectal cancer, ovarian cancer, endometrial cancer, breast cancer, triple negative breast cancer, pancreatic cancer, stomach (gastric) cancer, cervical cancer, head and neck cancer, thyroid cancer, testis cancer, urothelial cancer, lung cancer (small cell lung, non-small cell lung), melanoma, non melanoma skin cancer (squamous and basal cell carcinoma), glioma, renal cancer (RCC), lymphoma (NHL or HL), Acute myeloid leukemia (AML), T cell Acute Lymphoblastic Leukemia (T-ALL), Diffuse Large B cell lymphoma, testicular germ cell tumors, mesothelioma, esophageal cancer, Merkel Cells cancer, MSI-high cancer, KRAS mutant tumors, adult T-cell leukemia/lymphoma, and Myelodysplastic syndromes (MDS). In some embodiments of the method, the cancer is selected from the group consisting of cancer triple negative breast cancer, stomach (gastric) cancer, lung cancer (small cell lung, non-small cell lung), Merkel Cells cancer, MSI-high cancer, KRAS mutant tumors, adult T-cell leukemia/lymphoma, and Myelodysplastic syndromes (MDS).

[0026] The present invention also provides a pharmaceutical dose kit comprising: a) a container comprising a unit dosage of an anti-TIGIT antibody; and b) a container comprising a unit dosage of an anti-PVRIG antibody.

[0027] The present invention also provides a pharmaceutical dose kit comprising: a) a container comprising a unit dosage of an anti-TIGIT antibody; b) a container comprising a unit dosage of an anti-PVRIG antibody; and c) a container comprising an anti-PD-1 antibody.

[0028] In a further aspect, the invention provides methods comprising: a) providing a cell population from a tumor sample from a patient; b) staining said population with labeled antibodies that bind: i) TIGIT protein; ii) PVRIG protein; iii) PVR protein; iv) PD-1 protein; v) PD-L1 protein; vi) PVRL2; and vi) a relevant isotype control for the antibodies in i)-vi); c) running fluorescence activated cell sorting (FACS); d) for each of TIGIT, PVRIG, PVR, PD-1, PVRL2 and PD-L1, determining the percentage of cells in said population that express the protein relative to said isotype control antibody; wherein if the percentage of positive cells is >1% for either TIGIT or PVR, and for either PVRIG or PVRL2, and for either PD-1 or PD-L1, proceeding to step e); and e) administering antibodies to TIGIT, PVRIG, and PD-1 to said patient.

[0029] In a further aspect, the invention provides methods comprising: a) providing a cell population from a tumor sample from a patient; b) staining said population with labeled antibodies that bind: i) TIGIT protein; ii) PVR protein; iii) PD-1 protein; iv) PD-L1 protein; and v) a relevant isotype control for the antibodies in i)-iv); c) running fluorescence activated cell sorting (FACS); d) for each of TIGIT, PVR, PD-1, and PD-L1, determining the percentage of cells in said population that express the protein relative to said isotype control antibody; wherein if the percentage of positive cells is >1% for all 4 receptors, e) administering antibodies to TIGIT and PD-1 to said patient.

[0030] In an additional aspect, the invention provides methods comprising: a) providing a cell population from a tumor sample from a patient; b) staining said population with labeled antibodies that bind: i) PVRIG protein; ii) PVRL2 protein; iii) PD-1 protein; iv) PD-L1 protein; and v) a relevant isotype control for the antibodies in i)-iv); c) running fluorescence activated cell sorting (FACS); d) for each of PVRIG, PVRL2, PD-1 and PD-L1, determining the percentage of cells in said population that express the protein relative to said isotype control antibody; wherein if the percentage of positive cells is >1% for all 4 receptors, e) administering antibodies to PVRIG and PD-1 to said patient.

[0031] In a further aspect, the invention provides methods comprising a) providing a cell population from a tumor sample from a patient; b) staining said population with labeled antibodies that bind: i) PVRIG protein; ii) PVRL2 protein; iii) TIGIT protein; iv) PVR protein; and v) a relevant isotype control for the antibodies in i)-iv); c) running fluorescence activated cell sorting (FACS); d) for each of PVRIG, PVRL2, TIGIT and PVR, determining the percentage of cells in said population that express the protein relative to said isotype control antibody; wherein if the percentage of positive cells is >1% for all 4 receptors, e) administering antibodies to PVRIG and TIGIT to said patient.

[0032] In an additional aspect, the invention provides methods comprising: a) providing a cell population from a tumor sample from a patient; b) staining said population with labeled antibodies that bind: i) PVRIG protein; ii) TIGIT protein; iii) PVRL2 protein; iv) PD-1 protein; v) PD-L1 protein; and vi) a relevant isotype control for the antibodies in i)-v); c) running fluorescence activated cell sorting (FACS); d) for each of PVRIG, TIGIT, PVRL2, PD-1 and PD-L1, determining the percentage of cells in said population that express the protein relative to said isotype control antibody; wherein if the percentage of positive cells is >1% for all 5 receptors, e) administering antibodies to PVRIG, TIGIT, and PD-1 to said patient.

[0033] In a further aspect, the invention provides methods comprising a) providing a cell population from a tumor sample from a patient; b) staining said population with labeled antibodies that bind: i) PVRIG protein; ii) PVRL2 protein; iii) TIGIT protein; iv) PVR protein; v) PD-1; and vi) a relevant isotype control for the antibodies in i)-v); c) running fluorescence activated cell sorting (FACS); d) for each of PVRIG, PVRL2, TIGIT and PVR, determining the percentage of cells in said population that express the protein relative to said isotype control antibody; wherein if the percentage of positive cells is ≥1% for all 4 receptors, e) administering antibodies to PVRIG, TIGIT, and PD-1 to said patient.

[0034] In some embodiments, the present invention provides a method of treating cancer in a patient comprising: a) providing a biopsy from said patient comprising tumor cells; b) measuring the frequency of PD-L1 positive tumor cells or immune cells in said biopsy; c) if said frequency of PD-L1 positive tumor cells or immune cells is greater than 1% compared to staining the same tumor cells with a relevant isotype control antibody for the antibodies used, administering a triple combination therapy comprising an anti-TIGIT antibody, an anti-PVRIG antibody and an anti-PD-1 antibody; and d) if said frequency of PD-L1 positive tumor cells or immune cells is less than 1% compared to staining the same tumor cells with a relevant isotype control antibody for the antibodies used, administering a double combination therapy comprising an anti-TIGIT antibody and an anti-PVRIG antibody.

[0035] In some embodiments, the anti-TIGIT antibody is an antibody chosen from any anti-TIGIT antibody described herein, including any of those described in FIG. 3.

[0036] 3 In some embodiments, the anti-PVRIG antibody is an antibody chosen from any anti-PVRIG antibody described herein, including any of those described in FIG. 5 and/or FIG. 63.

[0037] In some embodiments, the anti-PD-1 antibody is an antibody chosen from any anti-PD-1 antibody described herein, including any of those described in FIG. 7.

[0038] In some embodiments, the anti-TIGIT antibody is an antibody chosen from at least one of CPA.9.083.H4(S241P), CPA.9.086.H4(S241P), CHA.9.547.7.H4(S241P), and CHA.9.547.13.H4(S241P).

[0039] In some embodiments, the anti-PVRIG antibody is an antibody chosen from at least one of CHA.7.518.1.H4(S241P) and CHA.7.538.1.2.H4(S241P).

[0040] In some embodiments, the anti-PD-1 antibody is an antibody chosen from at least one of pembrolizumab, Cemiplimab and nivolumab.

[0041] 8 In some embodiments, the double combination therapy is chosen from the administration of CPA.9.083.H4(S241P) and CHA.7.518.1.H4(S241P); CPA.9.086.H4(S241P) and CHA.7.518.1.H4(S241P); CHA.9.547.7.H4(S241P) and CHA.7.518.1.H4(S241P); CHA.9.547.13.H4(S241P) and CHA.7.518.1.H4(S241P); CPA.9.083.H4(S241P) and CHA.7.538.1.2.H4(S241P); CPA.9.086.H4(S241P) and CHA.7.538.1.2.H4(S241P); CHA.9.547.7.H4(S241P) and CHA.7.538.1.2.H4(S241P); and CHA.9.547.13.H4(S241P) and CHA.7.538.1.2.H4(S241P).

[0042] In some embodiments, the triple combination therapy is chosen from the administration of CPA.9.083.H4(S241P), pembrolizumab and CHA.7.518.1.H4(S241P); CPA.9.086.H4(S241P), pembrolizumab and CHA.7.518.1.H4(S241P); CHA.9.547.7.H4(S241P), pembrolizumab and CHA.7.518.1.H4(S241P); CHA.9.547.13.H4(S241P), pembrolizumab and CHA.7.518.1.H4(S241P); CPA.9.083.H4(S241P), pembrolizumab and CHA.7.538.1.2.H4(S241P); CPA.9.086.H4(S241P), pembrolizumab and CHA.7.538.1.2.H4(S241P); CHA.9.547.7.H4(S241P), pembrolizumab and CHA.7.538.1.2.H4(S241P); CHA.9.547.13.H4(S241P), pembrolizumab and CHA.7.538.1.2.H4(S241P); CPA.9.083.H4(S241P), nivolumab and CHA.7.518.1.H4(S241P); CPA.9.086.H4(S241P), nivolumab and CHA.7.518.1.H4(S241P); CHA.9.547.7.H4(S241P), nivolumab and CHA.7.518.1.H4(S241P); CHA.9.547.13.H4(S241P), nivolumab and CHA.7.518.1.H4(S241P); CPA.9.083.H4(S241P), nivolumab and CHA.7.538.1.2.H4(S241P); CPA.9.086.H4(S241P), nivolumab and CHA.7.538.1.2.H4(S241P); CHA.9.547.7.H4(S241P, nivolumab and CHA.7.538.1.2.H4(S241P); CHA.9.547.13.H4(S241P), nivolumab and CHA.7.538.1.2.H4(S241P); CHA.7.538.1.2.H4(S241P); CPA.9.083.H4(S241P), cemiplimab and CHA.7.518.1.H4(S241P); CPA.9.086.H4(S241P), cemiplimab and CHA.7.518.1.H4(S241P); CHA.9.547.7.H4(S241P), cemiplimab and CHA.7.518.1.H4(S241P); CHA.9.547.13.H4(S241P), and CHA.9.547.13.H4(S241P), and CHA.7.518.1.H4(S241P); CPA.9.083.H4(S241P), cemiplimab and CHA.7.538.1.2.H4(S241P); CPA.9.086.H4(S241P), cemiplimab and CHA.7.538.1.2.H4(S241P); CHA.9.547.7.H4(S241P, cemiplimab and CHA.7.538.1.2.H4(S241P); and CHA.9.547.13.H4(S241P), cemiplimab and CHA.7.538.1.2.H4(S241P).

[0043] In some embodiments, the antibodies are administered simultaneously.

[0044] In some embodiments, the antibodies are administered sequentially.

[0045] In some embodiments, the cancer is selected from the group consisting of prostate cancer, liver cancer (HCC), colorectal cancer, ovarian cancer, endometrial cancer, breast cancer, triple negative breast cancer, pancreatic cancer, stomach (gastric) cancer, cervical cancer, head and neck cancer, thyroid cancer, testis cancer, urothelial cancer, lung cancer (small cell lung, non-small cell lung), melanoma, non melanoma skin cancer (squamous and basal cell carcinoma), glioma, renal cancer (RCC), lymphoma (NHL or HL), Acute myeloid leukemia (AML), T cell Acute Lymphoblastic Leukemia (T-ALL), Diffuse Large B cell lymphoma, testicular germ cell tumors, mesothelioma, esophageal cancer, Merkel Cells cancer, MSI-high cancer, KRAS mutant tumors, adult T-cell leukemia/lymphoma, and Myelodysplastic syndromes (MDS).

[0046] In some embodiments, the cancer is selected from the group consisting of triple negative breast cancer, stomach (gastric) cancer, lung cancer (small cell lung, non-small cell lung), and Merkel Cells cancer, MSI-high cancer KRAS mutant tumors, adult T-cell leukemia/lymphoma, and Myelodysplastic syndromes (MDS).

[0047] In some embodiments, the present invention provides a method of treating cancer in a patient comprising administering a triple combination therapy comprising an anti-TIGIT antibody, an anti-PVRIG antibody, and an anti-PD-1 antibody.

[0048] In some embodiments, the anti-TIGIT antibody is an antibody chosen from at least one of CPA.9.083.H4(S241P), CPA.9.086.H4(S241P), CHA.9.547.7.H4(S241P), and CHA.9.547.13.H4(S241P).

[0049] In some embodiments, the said anti-PVRIG antibody is an antibody chosen from at least one of CHA.7.518.1.H4(S241P) and CHA.7.538.1.2.H4(S241P).

[0050] 1 In some embodiments, the anti-PD-1 antibody is an antibody selected from the group consisting of pembrolizumab, cemiplimab, and nivolumab.

[0051] In some embodiments, the triple combination therapy comprises the administration of an anti-PD-1 antibody in combination with a double-combination therapy chosen from the administration of CPA.9.083.H4(S241P) and CHA.7.518.1.H4(S241P); CPA.9.086.H4(S241P) and CHA.7.518.1.H4(S241P); CHA.9.547.7.H4(S241P) and CHA.7.518.1.H4(S241P); CHA.9.547.13.H4(S241P) and CHA.7.518.1.H4(S241P); CPA.9.083.H4(S241P) and CHA.7.538.1.2.H4(S241P); CPA.9.086.H4(S241P) and CHA.7.538.1.2.H4(S241P); CHA.9.547.7.H4(S241P) and CHA.7.538.1.2.H4(S241P); and CHA.9.547.13.H4(S241P) and CHA.7.538.1.2.H4(S241P).

[0052] In some embodiments, the triple combination therapy is chosen from the administration of CPA.9.083.H4(S241P), pembrolizumab and CHA.7.518.1.H4(S241P); CPA.9.086.H4(S241P), pembrolizumab and CHA.7.518.1.H4(S241P); CHA.9.547.7.H4(S241P), pembrolizumab and CHA.7.518.1.H4(S241P); CHA.9.547.13.H4(S241P), pembrolizumab and CHA.7.518.1.H4(S241P); CPA.9.083.H4(S241P), pembrolizumab and CHA.7.538.1.2.H4(S241P); CPA.9.086.H4(S241P), pembrolizumab and CHA.7.538.1.2.H4(S241P); CHA.9.547.7.H4(S241P), pembrolizumab and CHA.7.538.1.2.H4(S241P); CHA.9.547.13.H4(S241P), pembrolizumab and CHA.7.538.1.2.H4(S241P); CPA.9.083.H4(S241P), nivolumab and CHA.7.518.1.H4(S241P); CPA.9.086.H4(S241P), nivolumab and CHA.7.518.1.H4(S241P); CHA.9.547.7.H4(S241P), nivolumab and CHA.7.518.1.H4(S241P); CHA.9.547.13.H4(S241P), nivolumab and CHA.7.518.1.H4(S241P); CPA.9.083.H4(S241P), nivolumab and CHA.7.538.1.2.H4(S241P); CPA.9.086.H4(S241P), nivolumab and CHA.7.538.1.2.H4(S241P); CHA.9.547.7.H4(S241P, nivolumab and CHA.7.538.1.2.H4(S241P); CHA.9.547.13.H4(S241P), nivolumab and CHA.7.538.1.2.H4(S241P); CHA.7.538.1.2.H4(S241P); CPA.9.083.H4(S241P), cemiplimab and CHA.7.518.1.H4(S241P); CPA.9.086.H4(S241P), cemiplimab and CHA.7.518.1.H4(S241P); CHA.9.547.7.H4(S241P), cemiplimab and CHA.7.518.1.H4(S241P); CHA.9.547.13.H4(S241P), cemiplimab and CHA.7.518.1.H4(S241P); CPA.9.083.H4(S241P), cemiplimab and CHA.7.538.1.2.H4(S241P); CPA.9.086.H4(S241P), cemiplimab and CHA.7.538.1.2.H4(S241P); CHA.9.547.7.H4(S241P, cemiplimab and CHA.7.538.1.2.H4(S241P); and CHA.9.547.13.H4(S241P), cemiplimab and CHA.7.538.1.2.H4(S241P).

[0053] In some embodiments, the antibodies are administered simultaneously.

[0054] In some embodiments, the antibodies are administered sequentially.

[0055] In some embodiments, the cancer is selected from the group consisting of prostate cancer, liver cancer (HCC), colorectal cancer, ovarian cancer, endometrial cancer, breast cancer, triple negative breast cancer, pancreatic cancer, stomach (gastric) cancer, cervical cancer, head and neck cancer, thyroid cancer, testis cancer, urothelial cancer, lung cancer (small cell lung, non-small cell lung), melanoma, non melanoma skin cancer (squamous and basal cell carcinoma), glioma, renal cancer (RCC), lymphoma (NHL or HL), Acute myeloid leukemia (AML), T cell Acute Lymphoblastic Leukemia (T-ALL), Diffuse Large B cell lymphoma, testicular germ cell tumors, mesothelioma, esophageal cancer, Merkel Cells cancer, MSI-high cancer, KRAS mutant tumors, adult T-cell leukemia/lymphoma, and Myelodysplastic syndromes (MDS).

[0056] In some embodiments, the cancer is selected from the group consisting of triple negative breast cancer, stomach (gastric) cancer, lung cancer (small cell lung, non-small cell lung), and Merkel Cells cancer, MSI-high cancer, KRAS mutant tumors, adult T-cell leukemia/lymphoma, and Myelodysplastic syndromes (MDS).

[0057] In some embodiments, the present invention provides a pharmaceutical dose kit comprising: a) a container comprising a unit dosage of an anti-TIGIT antibody; and b) a container comprising a unit dosage of an anti-PVRIG antibody.

[0058] In some embodiments, the present invention provides a pharmaceutical dose kit comprising: a) a container comprising a unit dosage of an anti-TIGIT antibody; b) a container comprising a unit dosage of an anti-PVRIG antibody; and c) a container comprising an anti-PD-1 antibody.

[0059] In some embodiments, the anti-TIGIT antibody is an antibody chosen from any anti-TIGIT antibody described herein, including any of those described in FIG. 3.

[0060] In some embodiments, the anti-PVRIG antibody is an antibody chosen from any anti-PVRIG antibody described herein, including any of those described in FIG. 5 and/or FIG. 63.

[0061] In some embodiments, the anti-PD-1 antibody is an antibody chosen from any anti-PD-1 antibody described herein, including any of those described in FIG. 7.

[0062] In some embodiments, the present invention provides a method comprising: a) providing a cell population from a tumor sample from a patient; b) staining said population with labeled antibodies that bind: i) TIGIT protein; ii) PVRIG protein; iii) PVR protein; iv) PD-1 protein; v) PD-L1 protein; and vi) a relevant isotype control for the antibodies in i)-v); c) running fluorescence activated cell sorting (FACS); d) for each of TIGIT, PVRIG, PVR, PD-1 and PD-L1, determining the percentage of cells in said population that express the protein relative to said isotype control antibody; wherein if the percentage of positive cells is >1% for all 5 receptors, e) administering antibodies to TIGIT, PVRIG, and PD-1 to said patient.

[0063] In some embodiments, the anti-TIGIT antibody is an antibody chosen from any anti-TIGIT antibody described herein, including any of those described in FIG. 3.

[0064] In some embodiments, the anti-PVRIG antibody is an antibody chosen from any anti-PVRIG antibody described herein, including any of those described in FIG. 5 and/or FIG. 63.

[0065] In some embodiments, the anti-PD-1 antibody is an antibody chosen from any anti-PD-1 antibody described herein, including any of those described in FIG. 7.

[0066] In some embodiments, the TIGIT antibody is CPA.9.086.

[0067] In some embodiments, the PD-1 antibody is selected from pembrolizumab and nivolumab.

[0068] In some embodiments, the PVRIG antibody is CHA.7.518.1.H4(S241P).

[0069] In some embodiments, the present invention provides a method comprising: a) providing a cell population from a tumor sample from a patient; b) staining said population with labeled antibodies that bind: i) PVRIG protein; ii) TIGIT protein; iii) PVRL2 protein; iv) PD-1 protein; v) PD-L1 protein; and vi) a relevant isotype control for the antibodies in i)-v); c) running fluorescence activated cell sorting (FACS); d) for each of PVRIG, TIGIT, PVRL2, PD-1 and PD-L1, determining the percentage of cells in said population that express the protein relative to said isotype control antibody; wherein if the percentage of positive cells is >1% for all 5 receptors, e) administering antibodies to PVRIG and PD-1 to said patient.

[0070] In some embodiments, the anti-TIGIT antibody is an antibody chosen from any anti-TIGIT antibody described herein, including any of those described in FIG. 3.

[0071] In some embodiments, the anti-PVRIG antibody is an antibody chosen from any anti-PVRIG antibody described herein, including any of those described in FIG. 5 and/or FIG. 63.

[0072] In some embodiments, the anti-PD-1 antibody is an antibody chosen from any anti-PD-1 antibody described herein, including any of those described in FIG. 7.

[0073] In some embodiments, the anti-PD-L1 antibody is an antibody chosen from any anti-PD-L1 antibody described herein, including any of those described in FIG. 62.

[0074] In some embodiments, the PVRIG antibody is CHA.7.518.1.H4(S241P).

[0075] In some embodiments, the PD-1 antibody is selected from pembrolizumab and nivolumab.

[0076] In some embodiments, the TIGIT antibody is CPA.9.086.

[0077] In some embodiments, the present invention provides a method comprising: a) providing a cell population from a tumor sample from a patient; b) staining said population with labeled antibodies that bind: i) PVRIG protein; ii) PD-1 protein; iii) PVRL2 protein; iv) TIGIT protein; v) PVR protein; and vi) a relevant isotype control for the antibodies in i)-v); c) running fluorescence activated cell sorting (FACS); d) for each of PVRIG, PVRL2, TIGIT and PVR, determining the percentage of cells in said population that express the protein relative to said isotype control antibody; wherein if the percentage of positive cells is >1% for all 5 receptors, e) administering antibodies to PVRIG and TIGIT to said patient.

[0078] In some embodiments, the anti-TIGIT antibody is an antibody chosen from any anti-TIGIT antibody described herein, including any of those described in FIG. 3.

[0079] In some embodiments, the anti-PVRIG antibody is an antibody chosen from any anti-PVRIG antibody described herein, including any of those described in FIG. 5 and/or FIG. 63.

[0080] In some embodiments, the anti-PD-1 antibody is an antibody chosen from any anti-PD-1 antibody described herein, including any of those described in FIG. 7.

[0081] In some embodiments, the anti-PD-L1 antibody is an antibody chosen from any anti-PD-L1 antibody described herein, including any of those described in FIG. 62.

[0082] In some embodiments, the PVRIG antibody is CHA.7.518.1.H4(S241P).

[0083] In some embodiments, the TIGIT antibody is CPA9.086.

[0084] In some embodiments, the PD-1 antibody is selected from pembrolizumab and nivolumab.

[0085] In some embodiments, the present invention provides a method of treating cancer in a patient comprising: a) providing a biopsy from said patient comprising tumor cells; b) measuring the frequency of PD-L1 positive tumor cells or immune cells in said biopsy; c) if said frequency of PD-L1 positive tumor cells or immune cells is greater than 1% compared to staining the same tumor cells with a relevant isotype control antibody for the antibodies used, administering a triple combination therapy comprising an anti-TIGIT antibody, an anti-PVRIG antibody and an anti-PD-L1 antibody; and d) if said frequency of PD-L1 positive tumor cells or immune cells is less than 1% compared to staining the same tumor cells with a relevant isotype control antibody for the antibodies used, administering a double combination therapy comprising an anti-TIGIT antibody and an anti-PVRIG antibody.

[0086] In some embodiments, the anti-TIGIT antibody is an antibody chosen from any anti-TIGIT antibody described herein, including any of those described in FIG. 3.

[0087] In some embodiments, the anti-PVRIG antibody is an antibody chosen from any anti-PVRIG antibody described herein, including any of those described in FIG. 5 and/or FIG. 63.

[0088] In some embodiments, the anti-PD-1 antibody is an antibody chosen from any anti-PD-L1 antibody described herein, including any of those described in FIG. 62.

[0089] In some embodiments, the anti-TIGIT antibody is an antibody chosen from at least one of CPA.9.083.H4(S241P), CPA.9.086.H4(S241P), CHA.9.547.7.H4(S241P), and CHA.9.547.13.H4(S241P).

[0090] In some embodiments, the anti-PVRIG antibody is an antibody chosen from at least one of CHA.7.518.1.H4(S241P) and CHA.7.538.1.2.H4(S241P).

[0091] 58. A method according to any one of claims 52 to 57, wherein said anti-PD-L1 antibody is an antibody chosen from at least one of atezolizumab, avelumab, and durvalumab.

[0092] In some embodiments, the double combination therapy is chosen from the administration of CPA.9.083.H4(S241P) and CHA.7.518.1.H4(S241P); CPA.9.086.H4(S241P) and CHA.7.518.1.H4(S241P); CHA.9.547.7.H4(S241P) and CHA.7.518.1.H4(S241P); CHA.9.547.13.H4(S241P) and CHA.7.518.1.H4(S241P); CPA.9.083.H4(S241P) and CHA.7.538.1.2.H4(S241P); CPA.9.086.H4(S241P) and CHA.7.538.1.2.H4(S241P); CHA.9.547.7.H4(S241P) and CHA.7.538.1.2.H4(S241P); and CHA.9.547.13.H4(S241P) and CHA.7.538.1.2.H4(S241P).

[0093] In some embodiments, the triple combination therapy is chosen from the administration of CPA.9.083.H4(S241P), atezolizumab and CHA.7.518.1.H4(S241P); CPA.9.086.H4(S241P), atezolizumab and CHA.7.518.1.H4(S241P); CHA.9.547.7.H4(S241P), atezolizumab and CHA.7.518.1.H4(S241P); CHA.9.547.13.H4(S241P), atezolizumab and CHA.7.518.1.H4(S241P); CPA.9.083.H4(S241P), atezolizumab and CHA.7.538.1.2.H4(S241P); CPA.9.086.H4(S241P), atezolizumab and CHA.7.538.1.2.H4(S241P); CHA.9.547.7.H4(S241P), atezolizumab and CHA.7.538.1.2.H4(S241P); CHA.9.547.13.H4(S241P), atezolizumab and CHA.7.538.1.2.H4(S241P); CPA.9.083.H4(S241P), avelumab and CHA.7.518.1.H4(S241P); CPA.9.086.H4(S241P), avelumab and CHA.7.518.1.H4(S241P); CHA.9.547.7.H4(S241P), avelumab and CHA.7.518.1.H4(S241P); CHA.9.547.13.H4(S241P), avelumab and CHA.7.518.1.H4(S241P); CPA.9.083.H4(S241P), avelumab and CHA.7.538.1.2.H4(S241P); CPA.9.086.H4(S241P), avelumab and CHA.7.538.1.2.H4(S241P); CHA.9.547.7.H4(S241P, avelumab and CHA.7.538.1.2.H4(S241P); and CHA.9.547.13.H4(S241P), avelumab and CHA.7.538.1.2.H4(S241P); CPA.9.083.H4(S241P), durvalumab and CHA.7.518.1.H4(S241P); CPA.9.086.H4(S241P), durvalumab and CHA.7.518.1.H4(S241P); CHA.9.547.7.H4(S241P), durvalumab and CHA.7.518.1.H4(S241P); CHA.9.547.13.H4(S241P), durvalumab and CHA.7.518.1.H4(S241P); CPA.9.083.H4(S241P), durvalumab and CHA.7.538.1.2.H4(S241P); CPA.9.086.H4(S241P), durvalumab and CHA.7.538.1.2.H4(S241P); CHA.9.547.7.H4(S241P, durvalumab and CHA.7.538.1.2.H4(S241P); and CHA.9.547.13.H4(S241P), durvalumab and CHA.7.538.1.2.H4(S241P).

[0094] In some embodiments, the antibodies are administered simultaneously.

[0095] In some embodiments, the antibodies are administered sequentially.

[0096] In some embodiments, the cancer is selected from the group consisting of prostate cancer, liver cancer (HCC), colorectal cancer, ovarian cancer, endometrial cancer, breast cancer, triple negative breast cancer, pancreatic cancer, stomach (gastric) cancer, cervical cancer, head and neck cancer, thyroid cancer, testis cancer, urothelial cancer, lung cancer (small cell lung, non-small cell lung), melanoma, non melanoma skin cancer (squamous and basal cell carcinoma), glioma, renal cancer (RCC), lymphoma (NHL or HL), Acute myeloid leukemia (AML), T cell Acute Lymphoblastic Leukemia (T-ALL), Diffuse Large B cell lymphoma, testicular germ cell tumors, mesothelioma, esophageal cancer, Merkel Cells cancer, MSI-high cancer, KRAS mutant tumors, adult T-cell leukemia/lymphoma, and Myelodysplastic syndromes (MDS).

[0097] In some embodiments, the cancer is selected from the group consisting of triple negative breast cancer, stomach (gastric) cancer, lung cancer (small cell lung, non-small cell lung), and Merkel Cells cancer, MSI-high cancer, KRAS mutant tumors, adult T-cell leukemia/lymphoma, and Myelodysplastic syndromes (MDS).

[0098] In some embodiments, the present invention provides a method of treating cancer in a patient comprising administering a triple combination therapy comprising an anti-TIGIT antibody, an anti-PVRIG antibody, and an anti-PD-L1 antibody.

[0099] In some embodiments, the anti-TIGIT antibody is an antibody chosen from at least one of CPA.9.083.H4(S241P), CPA.9.086.H4(S241P), CHA.9.547.7.H4(S241P), and CHA.9.547.13.H4(S241P).

[0100] In some embodiments, the anti-PVRIG antibody is an antibody chosen from at least one of CHA.7.518.1.H4(S241P) and CHA.7.538.1.2.H4(S241P).

[0101] In some embodiments, the anti-PD-L1 antibody is an antibody selected from the group consisting of atezolizumab, avelumab, and durvalumab.

[0102] In some embodiments, the triple combination therapy comprises the administration of an anti-PD-L1 antibody in combination with a double-combination therapy chosen from the administration of CPA.9.083.H4(S241P) and CHA.7.518.1.H4(S241P); CPA.9.086.H4(S241P) and CHA.7.518.1.H4(S241P); CHA.9.547.7.H4(S241P) and CHA.7.518.1.H4(S241P); CHA.9.547.13.H4(S241P) and CHA.7.518.1.H4(S241P); CPA.9.083.H4(S241P) and CHA.7.538.1.2.H4(S241P); CPA.9.086.H4(S241P) and CHA.7.538.1.2.H4(S241P); CHA.9.547.7.H4(S241P) and CHA.7.538.1.2.H4(S241P); and CHA.9.547.13.H4(S241P) and CHA.7.538.1.2.H4(S241P).

[0103] In some embodiments, the triple combination therapy is chosen from the administration of CPA.9.083.H4(S241P), atezolizumab and CHA.7.518.1.H4(S241P); CPA.9.086.H4(S241P), atezolizumab and CHA.7.518.1.H4(S241P); CHA.9.547.7.H4(S241P), atezolizumab and CHA.7.518.1.H4(S241P); CHA.9.547.13.H4(S241P), atezolizumab and CHA.7.518.1.H4(S241P); CPA.9.083.H4(S241P), atezolizumab and CHA.7.538.1.2.H4(S241P); CPA.9.086.H4(S241P), atezolizumab and CHA.7.538.1.2.H4(S241P); CHA.9.547.7.H4(S241P), atezolizumab and CHA.7.538.1.2.H4(S241P); CHA.9.547.13.H4(S241P), atezolizumab and CHA.7.538.1.2.H4(S241P); CPA.9.083.H4(S241P), avelumab and CHA.7.518.1.H4(S241P); CPA.9.086.H4(S241P), avelumab and CHA.7.518.1.H4(S241P); CHA.9.547.7.H4(S241P), avelumab and CHA.7.518.1.H4(S241P); CHA.9.547.13.H4(S241P), avelumab and CHA.7.518.1.H4(S241P); CPA.9.083.H4(S241P), avelumab and CHA.7.538.1.2.H4(S241P); CPA.9.086.H4(S241P), avelumab and CHA.7.538.1.2.H4(S241P); CHA.9.547.7.H4(S241P, avelumab and CHA.7.538.1.2.H4(S241P); and CHA.9.547.13.H4(S241P), avelumab and CHA.7.538.1.2.H4(S241P); CPA.9.083.H4(S241P), durvalumab and CHA.7.518.1.H4(S241P); CPA.9.086.H4(S241P), durvalumab and CHA.7.518.1.H4(S241P); CHA.9.547.7.H4(S241P), durvalumab and CHA.7.518.1.H4(S241P); CHA.9.547.13.H4(S241P), durvalumab and CHA.7.518.1.H4(S241P); CPA.9.083.H4(S241P), durvalumab and CHA.7.538.1.2.H4(S241P); CPA.9.086.H4(S241P), durvalumab and CHA.7.538.1.2.H4(S241P); CHA.9.547.7.H4(S241P, durvalumab and CHA.7.538.1.2.H4(S241P); and CHA.9.547.13.H4(S241P), durvalumab and CHA.7.538.1.2.H4(S241P).

[0104] In some embodiments, the antibodies are administered simultaneously.

[0105] In some embodiments, the antibodies are administered sequentially.

[0106] In some embodiments, the cancer is selected from the group consisting of prostate cancer, liver cancer (HCC), colorectal cancer, ovarian cancer, endometrial cancer, breast cancer, triple negative breast cancer, pancreatic cancer, stomach (gastric) cancer, cervical cancer, head and neck cancer, thyroid cancer, testis cancer, urothelial cancer, lung cancer (small cell lung, non-small cell lung), melanoma, non melanoma skin cancer (squamous and basal cell carcinoma), glioma, renal cancer (RCC), lymphoma (NHL or HL), Acute myeloid leukemia (AML), T cell Acute Lymphoblastic Leukemia (T-ALL), Diffuse Large B cell lymphoma, testicular germ cell tumors, mesothelioma, esophageal cancer, Merkel Cells cancer, MSI-high cancer, KRAS mutant tumors, adult T-cell leukemia/lymphoma, and Myelodysplastic syndromes (MDS).

[0107] In some embodiments, the cancer is selected from the group consisting of triple negative breast cancer, stomach (gastric) cancer, lung cancer (small cell lung, non-small cell lung), and Merkel Cells cancer, MSI-high cancer, KRAS mutant tumors, adult T-cell leukemia/lymphoma, and Myelodysplastic syndromes (MDS).

### III. BRIEF DESCRIPTION OF THE DRAWINGS

[0108] FIG. 1A-1B depicts the amino acid sequences of the constant domains of human IgG1 (with some useful amino acid substitutions), IgG2, IgG3, IgG4, IgG4 with a hinge variant that finds particular use in the present invention, and the constant domains of the kappa and lambda light chains.

[0109] FIG. 2 depicts the sequence of human and cynomolgus macaque (referred to as cyno) TIGIT, PVRIG and PD-1 proteins.

[0110] FIG. 3A-3PPPP depicts the sequences of four anti-TIGIT antibodies that block the interaction of TIGIT and PVR, CPA.9.083.H4(S241P), CPA.9.086.H4(S241P), CHA.9.547.7.H4(S241P) and CHA.9.547.13.H4(S241P), as well as benchmark antibodies, BM26 and BM29, and numerous other anti-TIGIT antibodies.

[0111] FIG. 4A-4E shows the FACS K_{D} results of anti-TIGIT antibodies (CPA.9.083.H4(S241P), CPA.9.086.H4(S241P), CHA.9.547.7.H4(S241P), and CHA.9.547.13.H4(S241P), as well as benchmark antibodies, BM26 and BM29, binding to human (A), cynomolgus (B), and mouse (C) TIGIT over-expressing Expi293 HEK cells.

[0112] FIG. 5A-5F depicts the sequences of two anti-PVRIG antibodies, CHA.7.518.1.H4(S241P) and CHA.7.538.1.2.H4(S241P). Other PVRIG antibodies are provided in FIG. 63.

[0113] FIG. 6A-6B shows the binding of CHA.7.518.1.H4(S241P) to PVRIG by flow cytometry. (A) Binding to PVRIG over-expressing HEK293 cells. CHA.7.518.1.H4(S241P) binds human and cynomolgus PVRIG over-expressing HEK293 cells but not the mouse PVRIG over-expressing or parental HEK293 cells. (B) Binding of CHA.7.518.1.H4(S241P) to Jurkat cells. Specific binding is observed for CHA.7.518.1.H4(S241P) but not for an irrelevant isotype control antibody. Dissociation constant (K_{D}) for CHA.7.518.1.H4(S241P) binding to targets expressed on cells are listed in the table.

[0114] FIG. 7A-7F depicts the sequences of two anti-PD-1 antibodies.

[0115] FIG. 8A-8B shows the expression of PVRIG, TIGIT, PD1 on CMVpp65 reactive T cells, as described in experiments of Example 1. (A) Gating strategy for detection of tetramer-stained CMV-CTLs. The gating hierarchy and tetramer positive cells in three donors are shown. The lymphocytes were gated in the FS/SS quadrant (upper left) followed by the selection of singlets, followed by the removal of CD14-CD19-CD56-cells, followed by CD3+ CD8+ positive cells. Within the CD3+ CD8+ positive population, the percentage of cells that bind each tetramer is determined in individual donors. Staining results using the HLA-A*02:01 CMV tetramer are shown. (B) The expression of PVRIG, TIGIT and PD-1 on the CMVpp65 reactive T cells expanded from 3 donors is shown.

[0116] FIG. 9A-9D shows the kinetics of PVRIG, TIGIT and PD-1 expression on CD8+ CMV+ T cells, as described in experiments of Example 1. (A) Percent pp65 tetramer positive of CD8 T cells after 0, 72, 144, 216 and 288 hours of stimulation with IL-2, IL-7 and CMV pp65 peptide is shown. (B) TIGIT, (C) CHA.7.518.1.H4(S241P), (D) PD-1 expression on CMVpp65 reactive CD8 T-cells at distinct time points after stimulation. (n=3)

[0117] FIG. 10 shows the expression of PVRL2, PVR, PDL1 and HLA-A2 on the Colo205 and Panc.04.05 cells was evaluated by flow cytometry, as described in experiments of Example 1. The number in the upper right hand corner denotes the percentage of the ligand (PVRL2, PVR, PDL1) or HLA-A2 expressed on the tumor cell lines in comparison to the isotype control antibody.

[0118] FIG. 11A-11G shows the effect of inhibitory receptor blockade on CMVpp65 reactive CD8 T cells in co-culture with cancer cell lines, as described in experiments of Example 1. CMVpp65 reactive T cells for 2 donors (Donor 4 and Donor 156 were co-cultured with 0.03 ug/ml CMVpp65 peptide loaded Panc.04.05 or Colo205 for 24 hr in the presence of 10 ug/ml CHA.7.518.1.H4(S241P), anti-TIGIT, anti-PD-1, or isotype control either alone or in combination. (A) CHA.7.518.1.H4(S241P), anti-TIGIT or anti-PD1 antibodies tested alone, in dual combination, or in triple combination. (B) CHA.7.518.1.H4(S241P) and anti-TIGIT antibodies tested alone or in combination. (C) CHA.7.518.1.H4(S241P) and anti-PD1 antibodies tested alone or in combination. (D) Anti-TIGIT and anti-PD1 antibodies tested alone or in combination. Conditioned media were assayed for cytokine secretion. The bar graphs show the average+standard deviation for IFN-γ, with each dot representing a technical replicate. Data are representative of n>2 experiments.

[0119] FIG. 12A-12C shows the expression of PVRIG on cells from dissociated tumors, as described in experiments of Example 2. (A) Samples were grouped based on the tumor type as defined by the pathology report. For each sample, expression of PVRIG is shown on CD4+ T cells, CD8+ T cells, CD4−CD8− T cells, and on NK cells. Each dot within a column represents an individual sample. Samples with a MFIr value above 1 denotes expression of PVRIG was detected. The median is depicted by the middle line and the upper and lower quartiles are depicted by the grey space above and below the median line. (B) Across all tumor samples examined, the expression of PVRIG on CD4+ T cells, CD8+ T cells, CD4−CD8− T cells, and on NK cells is shown. The median is depicted by the middle line and the upper and lower quartiles are depicted by the light and dark grey space above and below the median line. The whiskers depict 1.5 times the interquartile range. (C) Representative FACS histograms for PVRIG (blue) compared to isotype control (red) are shown for 4 cell subsets isolated from a lung and kidney tumor.

[0120] FIG. 13 shows the correlation analysis of PD1, TIGIT, and PVRIG expression on CD4+ and CD8+ T cells from dissociated endometrial tumors, as described in experiments of Example 2. For each endometrial sample, a MFIr was calculated for PVRIG, PD1, and TIGIT on CD4 and CD8 T cells. A Spearman's correlation analysis was performed and a r2 and p value reported.

[0121] FIG. 14 shows the co-expression analysis of PD1, TIGIT, and PVRIG expression on CD8+ T cells from a dissociated lung and kidney cancer sample, as described in experiments of Example 2.

[0122] FIG. 15A-15B shows a comparison of PVRIG expression on T cells from dissociated tumors with matched NAT, as described in experiments of Example 2. (A) Matched tumor and normal adjacent tissues from colon/stomach/rectal, endometrium/uterine, kidney, lung, and ovarian tumors were assessed for PVRIG expression on CD4 and CD8 T cells. Each line represents a matched donor. A paired Student's t-test was performed on all samples comparing NAT vs tumor expression of PVRIG on CD4 and CD8 T cells. (B) PVRIG fold change (in NAT vs tumor) is plotted vs PD1 fold change for CD4 and CD8 T cells. A spearman's correlation analysis was done and r value and p value is shown.

[0123] FIG. 16 shows the expression of PVRL2 on immune and non-immune subsets from all dissociated tumor samples, as described in experiments of Example 2. The expression of PVRL2 on various cell subsets derived from tumors is shown. MFIr values above 1 denote expression of PVRL2 was detected. The median is depicted by the middle line and the upper and lower quartiles are depicted by the light and dark grey space above and below the median line. The whiskers depict 1.5 times the interquartile range.

[0124] FIG. 17 shows the expression of PVRL2 on non-immune subsets from dissociated tumors, as described in experiments of Example 2. Samples were grouped based on the tumor type as defined by the pathology report. For each sample, expression of PVRL2 is shown on CD45-non-immune cells. Each dot represents an individual sample. The median is depicted by the middle line and the upper and lower quartiles are depicted by the grey space above and below the median line.

[0125] FIG. 18 shows the expression of PVRL2 on myeloid cell subsets from dissociated tumors, as described in experiments of Example 2. Samples were grouped based on the tumor type as defined by the pathology report. For each sample, expression of PVRL2 is shown on myeloid cells which include monocytes, mDC, and pDC populations. Each dot represents an individual sample. The median is depicted by the middle line and the upper and lower quartiles are depicted by the grey space above and below the median line.

[0126] FIG. 19A-19B shows a comparison of PVRL2 expression on monocytes and CD45-tumor cells from dissociated tumors and matched NAT, as described in experiments of Example 2. (A) Matched tumor and normal adjacent tissues from colon/stomach/rectal, endometrium/uterine, kidney, lung, and ovarian tumors were assessed for PVRL2 expression on CD45-cells and on monocytes. Each line represents a matched donor. A paired Student's t-test was performed on all samples comparing NAT vs tumor expression of PVRL2 on CD45-cells and on monocytes cells. (B) PVRL2 fold change (in NAT vs tumor) is plotted vs PD-L1 fold change for CD45-cells and for monocytes. A spearman's correlation analysis was done and r value and p value is shown.

[0127] FIG. 20 depicts the co-expression of PVRIG on T cells with PVRL2 on monocytes and CD45-cells in tumor tissues, as described in experiments of Example 2. From the same sample, the expression of PVRIG on CD8 T cells and PVRL2 on monocytes or CD45-cells was plotted. Tumor types were grouped and each dot represents an individual tumor. Reference lines were drawn at MFIr value of 2.

[0128] FIG. 21A-21E depicts the expression of PVRL2 and PD-L1 in colon, skin, and breast cancers, as described in experiments of Example 3.

[0129] FIG. 22A-22B depicts the expression of PVRL2 in PD-L1 negative and PD-L1 positive tumors, as described in experiments of Example 3. Based on PD-L1 staining, tumors were categorized as PD-L1 Negative (No staining of PD-L1 observed in either duplicate cores for each tumor) or PD-L1 Positive (Positive staining observed in both duplicate cores for each tumor. A) Expression of PVRL2 was analyzed and shown for each cancer type. B) Of the PD-L1 negative tumors, the number of PVRL2 expressing samples (PVRL2 partial positive or greater/total samples) for each cancer type is shown.

[0130] FIG. 23A-23B shows the expression of PVRL2 and PD-L1 at the invasive front of the tumor, as described in experiments of Example 3. A. In this tumor sample, PVRL2 was expressed on both immune cells and tumor cells at the invasive front, as delineated by the blue and red lines. B) In this tumor sample, PD-L1 was expressed in the immune compartment.

[0131] FIG. 24A-24C shows antitumor responses of mono, dual and triple combination antibody treatments in the CT26 tumor model, as described in experiments of Example 4. Groups of 10-15 Balb/c mice were subcutaneously injected with 5×10⁵ CT26 cells. Mice were treated ×2 weekly for 3 weeks, starting at day 7 post inoculation with the designated antibody combination. A) Tumor volumes of all tested groups were measured ×2 weekly, including positive control group (anti-PDL-1+anti-CTLA-4 antibodies). The TGIs and p-values of the triple combination group compared to the indicated groups summarized in the table. B) Survival proportions of assigned groups. C) Spider plots showing individuals response over treatment groups, while PR indicates partial responders with tumor size not exceeding 1000 mm³.

[0132] FIG. 25A-25D depicts expression profiles for PVRIG and PVRL2, as well as PD-L1 in various human tumors, as described in experiments of Examples 2 and 3.

[0133] FIG. 26 depicts in vivo data regarding the use of an anti-PVRIG antibody in TIGIT−/− mice or the combination of anti-PVRIG and anti-PD-1 antibodies in wild type Balb/c mice to reduce syngeneic tumor growth, as described in experiments of Example 4.

[0134] FIG. 27A-27H. PVRIG is expressed highest on cytotoxic lymphocyte subsets from human cancer. A) Expression of PVRIG on leukocyte cell subsets from 5-8 healthy donor PBMCs is shown. PVRIG expression is defined as the ratio of PVRIG MFI relative to isotype control MFI. B) Expression of PVRIG, TIGIT, CD96, and PD-1 on peripheral blood Tregs as compared to CD8 T cell subsets from 5 healthy donor PBMCs is shown. C) CMV pp65 specific T cells from 3 healthy donors were expanded in vitro with pp65 (495-503) peptide, IL-2 and IL-7 for up to 7 days. Expression of TIGIT (blue) and PVRIG (black) on HLA-A2/pp65 (495-503) tetramer positive cells is shown. D) Human T cells were cultured with allogeneic DCs and expression of TIGIT and PVRIG shown on CD4⁺ T cells on day 0, 1, 2, and 7 post activation. E) Representative FACS plots showing expression of PVRIG (blue) compared to isotype control (red) on TILS (CD4 T cells, CD8 T cells, and NK cells) from a representative lung and kidney cancer. F) Co-expression of PVRIG, TIGIT, and PD-1 on CD4 and CD8 TILS from a lung cancer sample is shown. G) Expression of PVRIG on CD8⁺ and CD4⁺ TILS from dissociated human tumors of various cancer types is shown. Each dot represents a distinct tumor from an individual patient. H) Relative expression on CD8 TILs vs Treg TILS for PVRIG, TIGIT, and PD-1 from endometrial, kidney, and lung tumors was assessed. For each tumor, the fold expression on CD8 TILS was normalized to fold expression on Treg TILS and plotted. For A, B, C, G, and H, mean+SEM is shown by the error bars.

[0135] FIG. 28A-28F. PVRL2 expression is enhanced in the tumor microenvironment. A) PVRL2 expression was assessed by IHC on lung, ovarian/endometrial, breast, colon, and kidney tumors. For each tumor, 2 cores were assessed by 2 independent observers. Representative staining for each descriptor is shown in Figure B) A representative melanoma tumor showing PVRL2 expression on tumor cells and in the immune cells in the stroma is shown. C) PVRL2 expression from dissociated tumors was examined by FACS on CD45⁻, CD14⁺ TAMs, and CD14⁻CD33^{hi} mDC cell subsets. Mean+SEM is shown for each cancer type. D) Representative FACS plots for PVRL2 expression (blue) as compared to IgG (red) are shown for a lung cancer. E) For tumor samples where we were able to assess both PVRIG and PVRL2 expression, PVRIG expression on CD8 T cells is plotted versus PVRL2 expression on CD14⁺ TAMS for each tumor. Each dot represents an individual tumor sample. Red line represents a 2 fold expression of PVRIG or PVRL2 compared to IgG.

[0136] FIG. 29A-29E. Distinct regulation of PVRL2 and PD-L1 on tumor cells. A) Expression of PD-L1 and PVRL2 was assessed by IHC on serial sections. Expression of PVRL2 on PD-L1 negative (left) and PD-L1 positive (tumors) is shown. PD-L1 negative tumors were defined as no staining observed on duplicate cores for a given tumor. PD-L1 positive staining was defined as at least partial positive on both duplicate cores of a give tumor. The number of PVRL2 positive tumors from PD-L1 positive and PD-L1 negative tumors is shown in the table (positive/total). B, C) Representative expression of a PVRL2⁺PD-L1⁻ endometrial (B) tumor and a PVRL2⁺PD-L1⁻ lung (C) tumor. D) Immature BM-DCs were cultured with the indicated stimuli and PVR, PVRL2, PD-L1 expression assessed by FACS on day 2 of culture. For each condition, expression was normalized to media only control condition. E) Expression of PVR, PVRL2, and PD-L1 on HT-29 cells treated with IFN-γ or media alone is shown. PD-L1 or PVRL2 is shown in blue and IgG isotype control staining is shown in red.

[0137] FIG. 30A-30I. CHA.7.518.1.H4(S241P) is a high affinity antibody that enhances T cell activation. A) Binding of CHA.7.518.1.H4(S241P) or IgG isotype control to HEK293 PVRIG or HEK293 parental cells by FACS is shown. FACS KD values are shown for the binding of CHA.7.518.1.H4(S241P) to HEK293 hPVRIG, HEK293 cPVRIG, and Jurkat cells. B) CHA.7.518.1.H4(S241P) disrupts the binding of PVRL2 Fc to HEK293 cells ectopically expressing PVRIG. Mean+Std Dev of triplicate values is shown. C) CHA.7.518.1.H4(S241P) blocks the binding of PVRIG Fc to HEK293 cells that endogenously express PVRL2. D) Human CD4 T cells were co-cultured with aAPC CHO cells expressing a cell surface bound anti-CD3 antibody and hPVRL2 in the presence of 10 μg/ml anti-PVRIG antibody and human IgG isotype control antibodies. The effect of anti-PVRIG Ab on proliferation of CD4 T cells isolated from 11 different donors is shown. Bars depicted mean+SEM. E) gp100 specific T cell lines (TIL-209, TIL-463) were co-cultured with CHO cells engineered to express HLA-A2 and PVRL2 along with 10 μg/ml anti-PVRIG or IgG isotype control antibody. IFN-γ and TNF-α production was tested at 24 hours post co-culture. Mean+Std Dev of triplicate values is shown. Percent change in IFN-γ and TNF-α for each condition relative to isotype control is depicted by the number above each bar. F) Expression of PVR, PVRL2, and PD-L1 (red) relative to IgG (blue) on MEL624, Colo205, and Panc.05.04 cells is shown. For the T cells, expression of PVRIG, TIGIT, and PD-1 (red) relative to IgG (blue) on TIL-209 and TIL-463 gp100 specific T cells, and on CMVpp65 specific T cells is shown. To expand CMVpp65 reactive T cells, PBMCs were cultured with pp65 (495-503) peptide, IL-2, and IL-7 for 10 days. Expression of PVRIG, TIGIT, PD-1 is shown on HLA-A2/pp65 tetramer positive cells. G) gp100 specific T cells (TIL-209, TIL-463) expanded from TILS derived from melanoma tumors were co-cultured with MEL624 cells in the presence of 10 μg/ml of the indicated antibodies. IFN-γ concentration in the conditioned media was determined at 24 hrs. H, I) Expanded CMVpp65 specific T cells were co-cultured with Colo205 and Panc.05.04 cells, CMVpp65 peptide, and the indicated antibodies at 10 μg/ml. IFN-γ concentration in the conditioned media was determined at 24 hrs. For E, G, H, I, average+Std Dev of triplicates is shown. Percent change in IFN-γ for each condition relative to isotype control is depicted by the number above each bar.

[0138] FIG. 31A-31E. PVRIG deficient mice have increased T cell function. A) RNA expression of PVRIG as measured by qRT-PCR from purified mouse immune cell subsets was assessed. Relative expression to housekeeping was determined by ΔCt method. B) pmel CD8⁺ TCR transgenic T cells were activated with gp100 (25-33) and PVRIG and TIGIT RNA transcript levels assessed by qRT-PCR at the indicated time points. Graph shows mean+SEM of results from 5 different experiments. C) Spleens were harvested from PVRIG^{-/-} and WT littermates and analyzed by flow cytometry for expression of PVRIG on NK, CD4⁺ and CD8⁺ T cells (“Resting” cells). In addition, CD3⁺ T cells were isolated from splenocytes and activated for 11 days with anti-CD3/anti-CD28 beads. Following the activation, PVRIG expression on CD4⁺ and CD8⁺ T cells (“activated” cells) was analyzed by flow cytometry. Each dot represents cells derived from an individual mouse. D) WT and PVRIG^{-/-} derived splenocytes were labeled with Cell Proliferation Dye eFluor450 and were cultured in the presence of Control-Fc (mouse IgG2a) or with mouse PVRL2 Fc. After 4 d of culture, cell division was analyzed by flow cytometry. Representative FACS plots from an experiment (left) and the summary of percentage inhibition by PVRL2 Fc (defined as % proliferation Control-Fc subtracted from % proliferation PVRL2 Fc) 3 independent experiments (right) are presented. * indicate p-value<0.05, paired student's t-test for the change in proliferation in the presence of PVRL2-FC relative to proliferation in the presence of protein control in WT versus PVRIG^{-/-} T cells E) pmel CD8⁺ T cells derived from pmel PVRIG^{-/-} or pmel PVRIG WT mice were activated for 11 days with their cognate peptide and IL2. Activated pmel CD8⁺ cells were then co-cultured with B16-Db/gp100 cells for 18 hours and following the co-culture were evaluated for CD107 expression and for cytokine production. Four independent experiments are presented as indicated by each paired dot. * indicate p-value<0.05, Student's t-test comparing PVRIG^{-/-} versus WT.

[0139] FIG. 32A-32H. PVRIG deficiency results in reduced tumor growth and increased CD8 effector T cell mechanism. (A) C57BL/6 WT or PVRIG^{-/-} mice were subcutaneously injected with 5×10⁵ MC38 cells. Tumor volumes were measured ×2 weekly. * indicate p-value<0.05 for WT mice versus PVRIG^{-/-} mice (ANOVA). (B) Individual tumor growth curves are shown. One representative experiment out of 2 performed is shown. (C) C57BL/6 WT or PVRIG^{-/-} mice were subcutaneously injected with 5×10⁵ MC38 cells. At day 14 post-inoculation, mice were treated with anti-PD-L1, ×2 weekly for 2 weeks. Tumor volumes were measured ×2 weekly. p-value=0.052 for WT mice versus PVRIG^{-/-} mice, both treated with anti-PD-L1. (D) Individual tumor growth curves are shown. One representative experiment out of 2 performed is shown. (E) Frequency of CD8⁺ IFN-γ*TNF-α effector cells in tumor-draining lymph nodes from 4 treatment groups on day 18 is shown. (F) Total number of CD8⁺ IFN-γ+TNF-α+ effector cells per mg tumor tissue on day 18 is shown. (G-H) Total TILS score and Cytotoxic T cells score relative to TILs, derived from nSolver 3.0 advanced analysis of the mouse pan-cancer immune codeset panel (Nanostring Technologies, Seattle, WA) run on CD45⁺ enriched cells from MC38 day 18 TILs isolated from 2 treatment groups per wild-type and PVRIG deficient mice.

[0140] FIG. 33A-33F. Antagonistic anti-PVRIG antibodies synergistically inhibit tumor grown in combination of PD-1 inhibitors or TIGIT genetic deficiency. A) Binding of mPVRL2 Fc fusion protein to mPVRIG HEK293 engineered cells that were pre-incubated with serial dilutions of anti-mPVRIG mAb or IgG isotype control Ab is shown. B) BALB/c mice were subcutaneously injected with 5×10⁵ CT26 cells. On day 14 post inoculation, mice were sacrificed and spleen, draining lymph nodes and tumors were harvested. Cells were analyzed by flow cytometry for expression of PVRIG on CD3⁺ CD4⁺ T cells, CD3⁺ CD8⁺ T cells, CD3⁻CD49b⁺ NK cells, CD11 b⁺ Gr-1⁺ Myeloid-Derived-Suppressor Cells (MDSC) and CD11b⁺F4/80⁺ macrophages. C, D) BALB/c mice were subcutaneously injected with 5×10⁵ CT26 cells. At day 7 post inoculation mice were treated with anti-PD-L1 and/or anti-PVRIG Ab, 2× weekly for 3 weeks (arrows indicate Ab treatment). C) Tumor volumes are shown. *** indicate p-value<0.001 (ANOVA) for anti-PD-L1+Rat IgG2b compared to anti-PD-L1+aPVRIG treated groups. Arrows indicate when antibodies were dosed. D. Survival analysis of complete responder's mice. * indicate p value<0.05 (Log-rank test) for anti-PD-L1+Rat IgG2b compared to anti-PD-L1+anti-PVRIG treated groups. One representative study of 3 studies are shown. E. C57BL/6 or TIGIT^{-/-} mice were subcutaneously injected with 1×10⁵ B16/Db-hmgp100 cells. Mice were treated 2× weekly for 3 weeks with the designated mAb starting on the day of inoculation (day 0). E. Tumor volumes were measured 2× weekly and average+SEM is shown. Tumor growth inhibition as measured at indicated days compared to control WT+mIgG1 isotype control. *** indicate p-value<0.001 for TIGIT^{-/-}+aPVRIG compared to WT+mIgG1 isotype control. Arrows indicate when antibodies were dosed. F. Individual tumor growth curves for each mouse is shown. One representative experiment out of 2 performed is shown.

[0141] FIG. 34A-34F. PVRIG is expressed on T and NK cells of TILS in human cancer. A) Expression of PVRIG, TIGIT, CD96, and PD-1 on CD4 T cell subsets from healthy donor PBMCs is shown. Mean+SEM is shown. B) Human T cells were co-cultured with allogeneic PBMCs and expression of PVRIG protein on CD4 and CD8 T cells shown (top). C) Tumors were dissociated and single cells were activated with anti-CD3 and anti-CD28. Expression of PVRIG (blue) relative to IgG isotype control (red) was assessed on day 0 (directly ex vivo) and day 5 post activation. D) Expression of PVRIG on NK cells from dissociated human tumors is shown. Each dot represents a distinct tumor from an individual patient. Mean+95% confidence internal is shown. D) Dissociated tumor cells were activated with anti-CD3 and anti-CD28 beads for 5 days. Expression of PVRIG (blue) relative to IgG control (red) on CD4 and CD8 T cells on day 0 directly ex vivo and on day 5 post activation is shown for 2 dissociated tumor samples. E) Expression of PVRIG was assessed on CD4 and CD8 T cells from dissociated tumors and from dissociated donor-matched normal adjacent tissue. Each line represents matched tissues obtained from an individual patient. A paired student's t-test was performed. F) A correlation analysis of the magnitude of PVRIG, TIGIT, and PD-1 fold expression relative to IgG isotype control on CD4 and CD8 T cells from tumors is shown. Each dot represents an individual tumor sample. A Spearman's correlation coefficient and p value are shown.

[0142] FIG. 35A-35F. Expression of PVRL2 is enhanced in colon, skin, and breast cancers. A) Photomicrographs showing the binding of Sigma anti human PVRL2 antibody to FFPE sections of positive cells, CHO-S human PVRL2 (right) compare to negative cells, CHO-S (left), following antigen retrieval at pH9. B) Anti-PVRL2 antibody was tested on a panel of PVRL2⁺ (HT29, MCF7, PC3, PANC1, RT4, NCI-H1573) and PVRL2⁻(Jurkat, OPM2, Daudi, CA46) cell lines. C-F) Example expression of PVRL2 in lung normal and cancer tissues. C) Normal tissue showing no staining. D) Lung Adenocarcinoma showing partial positive staining. E) Lung adenocarcinoma showing positive staining. F) Lung adenocarcinoma showing strong positive staining.

[0143] FIG. 36. PVRL2 is upregulated on TAMs and CD45⁻ cells in the tumor as compared to normal adjacent tissue. Expression of PVRL2 on CD45⁻ cells and TAMs from donor matched tumor and normal adjacent tissue is shown. A paired student's t-test p value is shown.

[0144] FIG. 37A-37B. PVRIG and PVRL2 are co-expressed in the same tumor sample. PVRIG expression on CD4 T cells (A) and NK cells (B) is plotted against PVRL2 expression on TAMS for an individual tumor.

[0145] FIG. 38A-38D. Activity of CHA.7.518.1.H4(S241P) on human T cells. A) Expression of PVRIG on CD4 T cells activated with CHO cells expressing cell surface bound anti-CD3 and PVRL2. B) Expression of HLA-A2, B-2m, and PVRL2 are shown on CHO-S parental and engineered CHO-S cell lines. Fold expression relative to isotype is depicted by the number. C) CHO cells ectopically expressing cell surface bound anti-CD3 and PVRL2 were co-cultured with purified CD8 T cells in the presence of varying concentrations of anti-PVRIG Ab or relevant IgG control. % Proliferation is shown. Each dot represents an average of triplicate values. D) CHO cells ectopically expression HLA-A2/B2m and PVRL2 were co-cultured with 2 gp100 specific T cell lines (TIL F4, TIL 209) in the presence of 1 μg/ml gp100 and varying concentrations of anti-PVRIG antibody or relevant IgG control. TNF-α concentrations on day 3 of co-culture is down. Each value represents an average of triplicates.

[0146] FIG. 39A-39J. Characterization of mPVRIG binding interactions and a surrogate anti-mPVRIG antibody. A, B) Binding of mPVRIG to mPVRL2 was assessed by surface plasmon resonance. C) Soluble receptor Fc or control proteins were incubated in a dose response with immobilized mPVRL2 HIS in an ELISA format. Bound receptor Fc is shown. D) Soluble PVRL2 HIS protein was incubated in a dose response with PVRIG Fc or DNAM Fc coated plates. E) Binding of mPVRIG Fc or control Fc fusion protein to B16-F10 cell line transfected with mPVRL2 siRNA, mPVRsRNA, or scrambled siRNA transfection is shown. F) Affinity characterization of rat anti-mouse PVRIG mAb was performed by examining the binding of anti-mPVRIG to HEK293 cells overexpressing mPVRIG. G) Affinity characterization of rat anti-mouse PVRIG mAb was performed by examining the of anti-mPVRIG to D10.G4.1 cell line endogenously expressing mPVRIG vs isotype control rat IgG is shown. H) Binding of anti-mPVRIG to D10.G4.1 cells transfected with mouse PVRIG-siRNA (green histogram) vs scr siRNA (orange histogram). I) Binding of mPVRIG Fc pre-incubated with anti-mPVRIG Ab to B16-F10 cells, which endogenously express PVRL2

[0147] FIG. 40A-40B. Generation of transgenic PVRIG and TIGIT knockout mice. The PVRIG conditional knockout and Tigit knockout mouse lines were generated by Ozgene Pty Ltd (Bentley WA, Australia). A) The targeting construct in which PVRIG exons 1 to 4 were floxed was electroporated into a C57BL/6 ES cell line, Bruce4 (Koentgen et al., Int Immunol 5: 957-964, 1993). B) The targeting construct in which the coding region of Tigit exon 1 (including the ATG) and exons 2 and 3 were replaced with an FRT-flanked neo cassette was electroporated into a C57BL/6 ES cell line, Bruce4. Homologous recombinant ES cell clones were identified by Southern hybridization and injected into goGermline blastocysts (Koentgen et al., genesis 54: 326-333, 2016). Male chimeric mice were obtained and crossed to C57BL/6J females to establish heterozygous germline offspring on C57BL/6 background. The germline mice were crossed to a ubiquitous FLP C57BL/6 mouse line to remove the FRT flanked selectable marker cassette and generate the conditional or knockout alleles (for PVRIG and Tigit, respectively). For PVRIG knockout, mice were further crossed to a ubiquitous Cre C57BL/6 mouse line to remove the loxP flanked exons and generate the knockout allele.

[0148] FIG. 41A-41I. PVRIG knockout mice are immune-phenotypically similar to wild-type mice. Mice (n=5 per wild-type and PVRIG knockout cohorts) were euthanized prior to venous blood being collected in anti-coagulant-coated tubes and harvesting of organs. Single cells were recovered from freshly harvested bone marrow, thymus, spleen, cutaneous and mesenteric lymph nodes. Cells were stained with fluorochrome-conjugated surface marker antibodies and acquired on a BD LSR Fortessa flow cytometer. Panels illustrate comparable frequencies of myeloid cells (A), dendritic cells (B), B cells (C), T cells (D), CD4 T cells (E), CD8 T cells (F), and NK cells (G) across lymphoid tissue types. (H-I) Whole venous blood was run on a Hemavet 950 veterinary hematology system to compare differential counts and frequencies of blood cell subsets from wild-type and PVRIG deficient mice.

[0149] FIG. 42. Increased T cell effector function in PVRIG^{-/-} mice treated with anti-PDL1 compared to WT with anti-PD-L1. MC38 tumors were inoculated into WT or PVRIG^{-/-} mice and were subsequently treated with anti-PD-L1 or rat IgG2b isotype control. On day 18, CD45+ tumor infiltrating lymphocytes were purified from tumors, RNA extracted, and transcript profiling performed. Several T cell related genes are shown, with each dot representing an individual mouse. Student's t test p values are shown.

[0150] FIG. 43A-43B. Anti-TIGIT and anti-PVRIG antibodies induce tumor cell killing. An in vitro co-culture assay with human CMV-specific CD8+ T cells expanded was utilized to assess the effect of the benchmark anti-TIGIT antibody and CHA.7.518.1.H4(S241P) on antigen-specific tumor cell killing. HLA-A2+ target cell lines used in the assay were the Me1624 (A) and Panc05.04 (B). Synagis hIgG4 is the isotype control antibody. Luciferase activity in the target cells was measured with the Bio-Glo luciferase substrate. Representative data (n≥2) shows the percent specific killing (mean+/−standard deviation) of Me1624 or Panc05.04 cells after a 16 hour co-culture with human CMV-specific CD8+ T cells from three different donors.

[0151] FIG. 44. Dose-dependent tumor cell killing of anti-TIGIT antibodies with CHA.7.518.1.H4(S241P). An in vitro co-culture assay with human CMV-specific CD8+ T cells was utilized to assess the effect of two different anti-TIGIT antibodies, BM26 and CPA.9.086 when combined with CHA.7.518.1.H4(S241P) on antigen-specific Me1624 cell killing. Luciferase activity in the target cells was measured with the Bio-Glo luciferase substrate. Representative data (n≥2) shows the percent specific killing (mean+/−standard deviation) of Me1624 cells after a 16 hour co-culture with human CMV-specific CD8+ T cells from one donor.

[0152] FIG. 45. CPA.9.086 CDR sequences, IMGT and Kabat numbering.

[0153] FIG. 46. Anti-TIGIT hIgG4+CHA.7.518.1.H4(S241P) combination induces tumor cell killing. Co-culture of CMV-reactive CD8+ T cells with Me1624 PVR, PVRL2 & luciferase OE Single dose of 10 μg/ml anti-TIGIT Ab and 10 μg/ml CHA.7.518.1.H4(S241P) with CMV-reactive donor 4, while dose titration starting at 0.5 μg/ml aTIGIT Ab and 10 μg/ml CHA.7.518.1.H4(S241P) with CMV-reactive donor 156.

[0154] FIG. 47. Anti-TIGIT antibodies augment IFN-γ when combined with an anti-PD-1 antibody. An in vitro co-culture assay with human CMV-specific CD8+ T cells was utilized to assess the effect of CPA.9.086 compared to the benchmark antibodies, BM26 and BM29, on antigen-specific cytokine secretion in combination with an anti-PD-1 antibody, pembrolizumab. The target cell line used in the assay was the HLA-A2+ pancreatic adenocarcinoma cells, Panc.05.04 that endogenously expresses human PVR and PD-L1. Panc.05.04 cells were pulsed with the CMV pp65 peptide at 0.01 μg/ml at 37° C. for 1 hour. Cells were then washed and plated at 50,000 cells/well in 96-well round-bottom tissue culture treated plates. Anti-human TIGIT antibodies or the isotype control hIgG4 antibody (anti-Synagis) were added at a concentration of 0.1 μg/ml in combination with the anti-PD-1 antibody (hatched bars) or a control hIgG4 isotype antibody at 10 μg/ml (solid bars). Human CMV-specific CD8+ T cells from a single donor were expanded according to the protocol above. 50,000 human CD8+ T cells were added to each well. Co-cultures were incubated at 37° C. with 5% CO₂ for 24 hours. The amount of human IFN-γ in the co-culture supernatant was measured by flow cytometry using a cytometric bead assay (BD Biosciences).

[0155] FIG. 48A-48D depicts expression profiling of PVRIG/TIGIT axis in tumors; lung and endometrial cancers are high for both PVRIG-PVRL2 and TIGIT-PVR pathway. (A, B) PVRIG and TIGIT expression were analyzed on CD4⁺ and CD8⁺ T cells from dissociated human tumors by FACS. Fold expression was calculated by dividing the MFI of PVRIG or TIGIT by the MFI of the IgG control. Grey line=No expression detected. Each orange dot is a distinct tumor sample and median of samples shown by the blue bar. C, D) Expression of PVRIG on CD8⁺ T cells vs PVRL2 on CD45⁻ cells or TIGIT on CD8⁺ T cells vs PVR on CD45⁻ cells is plotted from dissociated tumors. Each dot represents an individual tumor sample.

[0156] FIG. 49A-49F depicts expression data for PD-1, PVRIG and TIGIT on CD8 T cells, which shows that PVRIG+TIGIT+PD-1+CD8+ TILs are highly prevalent and have an exhausted profile. A) TILS from human cancers were stained for PD1, PVRIG, and TIGIT expression on CD8 T cells. The percentage of cells that express combinations of PD-1, PVRIG, or TIGIT on CD8+ T cells was determined by Boolean gating. B) Representative PD-1, PVRIG, and TIGIT expression on CD4+ and CD8+ T cells from a lung tumor are shown. C) TILS from human cancers were stained for cell surface PD1, PVRIG, and TIGIT on CD8+ T cells, permeabilized, and stained for Eomes and T-bet. Within each cell subset, the percentage of Eomes+T-bet-cells are shown. A paired Student's t-test was performed and p values shown. D) Representative FACS plots showing Eomes and T-bet expression on PD-1, PVRIG, or TIGIT expressing CD8 T cells from an ovarian and bladder tumor are shown. E) Percentage of Eomes+T-bet-cells expressing cells based on PD-1, PVRIG, and TIGIT expression was determined. Thus, PVRIG expression correlates with Eomes+T-bet-transcription factor expression, a phenotype known to be associated with T cell exhaustion. Triple positive PVRIG+TIGIT+PD-1+ cells were also high in percentage of Eomes+T-bet-cells.

[0157] FIG. 50A-50C shows that PVRL2 is induced in cancer and expressed in PD-L1⁻ tumors. A) PVRL2 expression was assessed by IHC on lung, ovarian/endometrial, breast, colon, kidney, and skin tumors. Bars depict mean+SEM. For each tumor, 2 cores were assessed by a pathologist and scored based on prevalence and intensity of membranous staining on tumor cells. For each tumor, the average score of 2 cores is shown. B) Expression of PD-L1 and PVRL2 was assessed by IHC on serial sections. Tumors were grouped based on tissue type and expression of PVRL2 on PD-L1 negative and PD-L1 positive is shown. PD-L1 negative tumors were defined as no membranous staining on tumor or immune cells from either duplicate cores for a given tumor. PD-L1 positive staining was defined as membranous staining on at least 1 core of a tumor. Bars depict mean+SEM for each group. C) Representative expression of a PVRL2+PD-L1-endometrioid carcinoma tumor and a PVRL2+PD-L1-lung tumor.

[0158] FIG. 51A-51B shows that anti-PVRIG/TIGIT/PD-1 synergistically increases T cell function. (A) CMVpp65 CD8 T cells were stained for TIGIT/PD-1/PVRIG expression, and tumor cell lines were stained for PD-L1, HLA-A2, PVR & PVRL2. Representative FACs histograms are shown. B) CMVpp65 specific T cells were co-cultured with Panc0504 & Colo205 cells, CMVpp65 peptide and the indicated antibodies at 10 μg/ml. IFN-γ concentration in the conditioned media was determined at 18 hrs. Percentages above bar graphs is % increase in IFN-γ secretion over isotype IgG.

[0159] FIG. 52A-52C shows that the blockade of the PVRIG-PVRL2 interaction induces PD-1 and TIGIT expression. CMVpp65 specific T cells from 1-2 donors were co-cultured with Panc0504, CMVpp65 peptide, and the indicated antibodies at 10 μg/ml for 18 hours. Cells were then stained for FACs and the percentage of cells PD-1, TIGIT, and LAG3 for each treatment condition is shown. Representative histograms for each receptor is shown. Red=Isotype, Blue=Target expression. A) TIGIT expression was induced by CHA7.518.1.H4(S241P) or anti-PD1 treatment. (B) PD-1 expression was induced by CHA7.518.1.H4(S241P) and/or CPA.9.083.H4(S241P). (C) LAG-3 expression was not induced by CHA7.518.1.H4(S241P), anti-TIGIT, or anti-PD-1.

[0160] FIG. 53. Tumors obtained within 24 hrs of surgical resection were dissociated and purified CD3+ TILS co-cultured with MEL624 cells expressing surface bound anti-CD3 and the indicated antibodies at 10 μg/ml. IFN-γ concentration in the conditioned media was determined at 72 hrs. % change in IFN-γ for each condition relative to hIgG4 is shown.

[0161] FIG. 54A-54C. PVRIG ANTIBODY BLOCKADE OR DEFICIENCY RESULT IN REDUCED TUMOR GROWTH. PVRIG antibody blockade or deficiency inhibit tumor growth. A) BALB/c mice were subcutaneously injected with 5×105 CT26 cells. At day 7 post inoculation mice were treated with anti-PD-L1 and/or anti-PVRIG antibodies, twice weekly for 3 weeks. Tumor volumes are shown. n=10 mice per group. Mean⁺/−SEM is shown. *** Indicates p-value<0.001 (ANOVA with repeated measures) for anti-PD-L1⁺Rat IgG2b compared to anti-PD-L1⁺ anti-PVRIG treated groups. B) C57BL/6 WT or PVRIG−/− mice were subcutaneously injected with 5×105 MC38 cells. n=10 mice per group. Mean⁺/−SEM is shown. *Indicates p-value<0.05 for WT mice versus PVRIG−/− mice (ANOVA with repeated measures). Individual tumor growth curves are also shown. Representative data from n=2 experiments.

[0162] FIG. 55A-55D. EXPRESSION PROFILING OF PVRIG/TIGIT AXIS IN HUMAN TUMORS. Lung and endometrial cancers are high for both PVRIG-PVRL2 and TIGIT-PVR pathway. (A, B) PVRIG and TIGIT expression were analyzed on CD4⁺ and CD8⁺ T cells from dissociated human tumors by FACS. Fold expression was calculated by dividing the MFI of PVRIG or TIGIT by the MFI of the IgG control. Grey line=No expression detected. Each orange dot is a distinct tumor sample and median of samples shown by the blue bar. C, D) Expression of PVRIG on CD8⁺ T cells vs PVRL2 on CD45⁻ cells or TIGIT on CD8⁺ T cells vs PVR on CD45-cells is plotted from dissociated human tumors. Each dot represents an individual tumor sample.

[0163] FIG. 56A-56C. PVRIG+TIGIT+PD1+ CELLS ARE THE HIGHEST % AND MOST EXHAUSTED OF CD8+ TILS. PVRIG+TIGIT+PD1+ CD8+ TILs are highly prevalent and have an exhausted phenotype. A) CD8+ TILs from human cancers were stained for PD-1, PVRIG, and TIGIT. The percentage of CD8+ TILs that express combinations of PD-1, PVRIG, or TIGIT on CD8⁺ T cells was determined by Boolean gating. Each dot represents an individual tumor sample. B) CD8⁺ TILs from human cancers were stained for cell surface PD1, PVRIG, and TIGIT, permeabilized, and stained for intracellular Eomes and T-bet. The percentage of Eomes⁺T-bet-CD8⁺ T cells are shown. A paired Student's t-test was performed and p-values shown. C) The percentage of Eomes⁺T-bet-CD8⁺ T cells expressing PD-1, PVRIG, and TIGIT was determined across multiple human cancers.

[0164] FIG. 57. RELATIVE EXPRESSION OF PVRL2 VERSUS PVR VARIES BY TUMOR TYPE. Relative RNA and protein expression of PVRL2 and PVR across different human tumors. RNA expression of PVRL2 and PVR from the TCGA was plotted as a ratio of PVRL2 relative to PVR across multiple human tumors (left hand panel). Tumors with higher PVRL2 RNA expression compared to PVR include breast, ovarian, prostate, endometrial, bladder, pancreatic and lung. The ratio of protein expression (gMFI) of PVRL2 relative to PVR on CD45-tumor cells is plotted from dissociated human tumors (right hand panel). Each dot represents an individual tumor sample. Tumors with higher PVRL2 protein expression compared to PVR include ovary, breast, endometrial, lung, prostate, oral cavity and stomach. Higher RNA expression correlates with higher protein levels for PVRL2 across several tumors, including breast, ovarian, endometrial, prostate, and lung cancers.

[0165] FIG. 58A-58B. PVRL2+PVR-TUMOR CELLS AND APCs EXIST IN HUMAN TUMORS. PVRL2+PVR-tumor cells and APCs are present in human tumors. PVRL2 and PVR expression from dissociated tumors determined by FACS on A) CD45-tumor cells, and B) cDC2 (CDlc⁺CD14-HLA-DR^{hi}Lin⁻CD141⁻) and CD14⁺ TAMs is plotted. PVRL2⁺PVR-tumor cells and APCs are represented as red dots in the percent positive plots. Representative FACS plots for PVRL2 and PVR expression (blue) as compared to an IgG isotype control (red) are shown for ovarian and endometrial tumors.

[0166] FIG. 59A-59B. CHA7.518.1.H4(S241P)+CPA.9.083.H4(S241P) COMBO HAS ACTIVITY≥PEMBROLIZUMAB ON PRIMARY CD3+ TILS. CHA7.518.1.H4(S241P) and/or CPA.9.083.H4(S241P) have similar or greater potency than Pembrolizumab on freshly isolated human TILs. Human tumors obtained within 24 hours of surgical resection were dissociated and CD3⁺ TILs were purified. Isolated CD3⁺ TILs were co-cultured with a modified Mel-624 tumor cell line, expressing surface bound anti-CD3, and the indicated antibodies at 10 μg/ml. IFN-γ secretion in the conditioned media was measured at 72 hours. The percentage change in IFN-γ for each treatment over the hIgG isotype control is shown.

[0167] FIG. 60A-60C. BLOCKADE OF PVRIG/PVRL2 INDUCES PD-1 AND TIGIT EXPRESSION. Blockade of PVRIG/PVRL2 induces PD-1 & TIGIT expression. CMVpp65⁻specific CD8⁺ T cells from 2 donors were co-cultured with Panc.05.04, CMVpp65 peptide, and the indicated antibodies at 10 μg/ml for 18 hrs. Cells were stained and the percentage of A) TIGIT⁺, B) PD⁻1⁺, and C) LAG3⁺ CD8⁺ T cells following each treatment is shown.

[0168] FIG. 61A-61C. TRIPLE COMBINATION SHOWED IMPROVED ANTITUMOR EFFICACY. A) Growth kinetics of CT26 tumors in a minimal disease model. Groups of 10 female Balb/c were inoculated with CT26 cells in the right flank. I.p. antibody administration began when tumors reached a desired mean volume (30-60 mm³). Mice were treated with anti-TIGIT mIgG1 or anti-PVRIG mIgG1 at 10 mg/kg, anti-PD-L1 mIgG1 at 3 mg/kg, and control isotype at 10 mg/kg either as dual or triple combination, 3 times biweekly for a total of 6 doses. TGI with anti-TIGIT mIgG1 in combination was calculated by % TGI=[1-(average tumor volume of test article divided by average tumor volume of control article)*100]. The asterisk (***, ****) indicate p<0.001 or p<0.0001, respectively, for differences between dual or triple combination over isotype control, versus dual or triple combination group by 2-way ANOVA. B) Spider plots of individual tumor volumes of each mouse in the three treatment groups were measured until tumor volumes of >1500 mm³ or 45 days (study endpoints) were reached. C) Kaplan-Meier survival curves of mice treated in the three different treatment groups. A log-rank (Mantel-Cox) test revealed a p-value<0.0001, a 90% survival in mice treated triple antibody combination versus 40% survival in mice in dual antibody combination treatment.

[0169] FIG. 62A-62I depicts the sequences of exemplary anti-PD-L1 antibodies.

[0170] FIG. 63A-63AAAA depicts the sequences of numerous exemplary PVRIG antibodies.

### IV. DETAILED DESCRIPTION OF THE INVENTION

### A. Introduction

[0171] Therapeutic antibodies directed against immune checkpoint inhibitors such as PD-1 are showing great promise in limited circumstances in the clinic for the treatment of cancer. Cancer can be considered as an inability of the patient to recognize and eliminate cancerous cells. In many instances, these transformed (e.g. cancerous) cells counteract immunosurveillance. There are natural control mechanisms that limit T-cell activation in the body to prevent unrestrained T-cell activity, which can be exploited by cancerous cells to evade or suppress the immune response. Restoring the capacity of immune effector cells—especially T cells—to recognize and eliminate cancer is the goal of immunotherapy. The field of immuno-oncology, sometimes referred to as “immunotherapy” is rapidly evolving, with several recent approvals of T cell checkpoint inhibitory antibodies such as Yervoy®, Keytruda® and Opdivo®. These antibodies are generally referred to as “checkpoint inhibitors” because they block normally negative regulators of T cell immunity. It is generally understood that a variety of immunomodulatory signals, both costimulatory and coinhibitory, can be used to orchestrate an optimal antigen-specific immune response.

[0172] Generally, these monoclonal antibodies bind to checkpoint inhibitor proteins such as CTLA-4 and PD-1, which under normal circumstances prevent or suppress activation of cytotoxic T cells (CTLs). By inhibiting the checkpoint protein, for example through the use of antibodies that bind these proteins, an increased T cell response against tumors can be achieved. That is, these cancer checkpoint proteins suppress the immune response; when the proteins are blocked, for example using antibodies to the checkpoint protein, the immune system is activated, leading to immune stimulation, resulting in treatment of conditions such as cancer and infectious disease.

[0173] The present invention is directed to compositions and methods of using several anti-checkpoint inhibitors in combination, so as to result in better patient outcomes. In particular, combinations of anti-TIGIT, anti-PVRIG and anti-PD-1 antibodies are contemplated. Furthermore, these methods are particularly useful in combination with an evaluation of PD-L1 expression levels from the patient tumor. If the percentage of PD-L1 positive tumor cells or immune cells is greater than 1% (>1%) compared to the same tumor cells stained with antibody relevant isotype control antibody for the antibodies used then a triple combination of anti-TIGIT, anti-PVRIG and anti-PD-1 antibodies should be administered. Whereas, patients with a frequency of PD-L1 positive tumor cells or immune cells below 1% (<1%) compared to the isotype control should be administered a double combination of anti-TIGIT and anti-PVRIG antibodies.

[0174] As discussed herein, TIGIT is a co-inhibitory receptor that is highly expressed on effector & regulatory (Treg) CD4+ T cells, effector CD8+ T cells, and NK cells. TIGIT has been shown to attenuate immune response by (1) direct signaling, (2) inducing ligand signaling, and (3) competition with and disruption of signaling by the costimulatory receptor CD226 (also known as DNAM-1).

[0175] Human Poliovirus Receptor Related Immunoglobulin Domain Containing Protein, or “PVRIG”, is expressed on the cell surface of NK and T-cells and shares several similarities to other known immune checkpoints. PVRIG has been validated as a checkpoint inhibitor, see USSNs 62/118,208, 62/141,120, 62/235,823, 62/376,334, 15/048,967, 62/376,335, 62/417,217 and 62/477,974, all of which are expressly incorporated herein by reference in their entirety and in particular for the sequences of the antibodies, figures and figure legends therein. As shown in those documents, PVRL2 was identified/confirmed to be the counterpart of PVRIG. Antibodies that bind to PVRIG were generated, and then a subset of those were identified that both bind to PVRIG and block the interaction of PVRIG and PVLR2. When PVRIG is bound by its ligand (PVRL2), an inhibitory signal is elicited which acts to attenuate the immune response of NK and T-cells against a target cell (i.e. analogous to PD-1/PDL1). Blocking the binding of PVRL2 to PVRIG shuts-off this inhibitory signal of PVRIG and as a result modulates the immune response of NK and T-cells.

[0176] PD-1, or “programmed cell death protein 1”, is a known checkpoint inhibitor. There are two approved anti-PD-1 antibodies, pembrolizumab (Keytruda®), cemiplimab (REGN2810), and nivolumab (Opdivo®) and many more in development (including, but not limited to, pidilizumab, BAP049 clones as listed in WO2015/112900 (the sequences of which are expressly incorporated herein by reference), antibody 317-4B6 as listed in WO2015/035606 (the sequence of which is expressly incorporated herein by reference), antibody APE2058 as listed in US2016/0075783 (the sequence of which is expressly incorporated herein by reference).

[0177] There are three approved anti-PD-L1 antibodies, atezolizumab (TECENTRIQ®), avelumab (BAVENCIO®), and durvalumab, as well as other anti-PD-L1 antibodies in development.

[0178] Functional effects of the combinations of these antibodies on NK and T-cells can be assessed in vitro (and in some cases in vivo, as described more fully below) by measuring changes in the following parameters: proliferation, cytokine release and cell-surface makers. Accordingly, functional effects of the anti-TIGIT antibodies on NK, effector T, and Treg cells can be assessed in vitro (and in some cases, in vivo, as described more fully below) by measuring changes in the following parameters: proliferation, cytokine release and cell-surface receptors. For NK cells, increases in cell proliferation, cytotoxicity (ability to kill target cells as measured by increases in CD107a, granzyme, and perforin expression, or by directly measuring target cells killing), cytokine production (e.g. IFN-γ and TNF), and cell surface receptor expression (e.g. CD25) is indicative of immune modulation, e.g. enhanced killing of cancer cells. For effector T and Treg-cells, increases in proliferation, increases in expression of cell surface receptors of activation (e.g. CD25, CD69, CD137, and PD-1), cytotoxicity (ability to kill target cells, as mentioned above), and cytokine production (e.g. IL-2, IL-4, IL-6, IFN-γ, TNF-α, IL-10, IL-17A) are indicative of immune modulation, e.g. enhanced killing of cancer cells. Accordingly, assessment of treatment can be done using assays that evaluate one or more of the following: (i) increases in immune response, (ii) increases in activation of αβ and/or γδ T cells, (iii) increases in cytotoxic T cell activity, (iv) increases in NK and/or NKT cell activity, (v) alleviation of αβ and/or γδ T-cell suppression, (vi) increases in pro-inflammatory cytokine secretion, (vii) increases in IL-2 secretion; (viii) increases in interferon-7 production, (ix) increases in Th1 response, (x) decreases in Th2 response, (xi) decreases or eliminates cell number and/or activity of at least one of regulatory T cells.

[0179] In particular, any one of the assays shown in Example 1 can be used to measure T cell activation and/or suppression of T cell inhibition.

[0180] Thus, in some embodiments the invention provides the use of combination therapies of anti-TIGIT, anti-PVRIG and anti-PD-1 antibodies (or just anti-TIGIT and anti-PVRIG antibodies in some cases as outlined herein) to perform one or more of the following in a subject in need thereof. (a) upregulating pro-inflammatory cytokines; (b) increasing T-cell proliferation and/or expansion; (c) increasing interferon- or TNF-α production by T-cells; (d) increasing IL-2 secretion; (e) stimulating antibody responses; (f) inhibiting cancer cell growth; (g) promoting antigenic specific T cell immunity; (h) promoting CD4+ and/or CD8+ T cell activation; (i) alleviating Treg-mediated-cell suppression; (j) promoting NK cell activity; (k) promoting apoptosis or lysis of cancer cells; and/or (1) cytotoxic or cytostatic effect on cancer cells.

[0181] Accordingly, the present invention provides anti-TIGIT, anti-PVRIG and anti-PD-1 antibodies for use in combination therapies, and in conjunction with diagnostic assays measuring the levels of one or more of TIGIT, PVRIG and PD-1 expression, and/or measuring the levels of the ligands of TIGIT (e.g., PVR), PVRIG (PVRL2) and PD-1 (PD-L1).

### B. Definitions

[0182] In order that the application may be more completely understood, several definitions are set forth below. Such definitions are meant to encompass grammatical equivalents.

[0183] By “ablation” herein is meant a decrease or removal of activity. In some embodiments, it is useful to remove activity from the constant domains of the antibodies. Thus for example, “ablating FcγR binding” means the Fc region amino acid variant has less than 50% starting binding as compared to an Fc region not containing the specific variant, with less than 70-80-90-95-98% loss of activity being preferred, and in general, with the activity being below the level of detectable binding in a Biacore assay. As shown in FIG. 1, one ablation variant in the IgG1 constant region is the N297A variant, which removes the native glycosylation site and significantly reduces the FcγRIIIa binding and thus reduces the antibody dependent cell-mediated cytotoxicity (ADCC).

[0184] By “antigen binding domain” or “ABD” herein is meant a set of six Complementary Determining Regions (CDRs) that, when present as part of a polypeptide sequence, specifically binds a target antigen as discussed herein. Thus, a “TIGIT antigen binding domain” binds TIGIT antigen (the sequence of which is shown in FIG. 2) as outlined herein. As is known in the art, these CDRs are generally present as a first set of variable heavy CDRs (vhCDRs or V_{H}CDRs) and a second set of variable light CDRs (vlCDRs or V_{L}CDRs), each comprising three CDRs: vhCDR1, vhCDR2, vhCDR3 for the heavy chain and vlCDR1, vlCDR2 and vlCDR3 for the light. The CDRs are present in the variable heavy and variable light domains, respectively, and together form an Fv region. Thus, in some cases, the six CDRs of the antigen binding domain are contributed by a variable heavy and variable light chain. In a “Fab” format, the set of 6 CDRs are contributed by two different polypeptide sequences, the variable heavy domain (vh or V_{H}; containing the vhCDR1, vhCDR2 and vhCDR3) and the variable light domain (vl or V_{L}; containing the vlCDR1, vlCDR2 and vlCDR3), with the C-terminus of the vh domain being attached to the N-terminus of the CH1 domain of the heavy chain and the C-terminus of the vl domain being attached to the N-terminus of the constant light domain (and thus forming the light chain).

[0185] By “modification” herein is meant an amino acid substitution, insertion, and/or deletion in a polypeptide sequence or an alteration to a moiety chemically linked to a protein. For example, a modification may be an altered carbohydrate or PEG structure attached to a protein. By “amino acid modification” herein is meant an amino acid substitution, insertion, and/or deletion in a polypeptide sequence. For clarity, unless otherwise noted, the amino acid modification is always to an amino acid coded for by DNA, e.g. the 20 amino acids that have codons in DNA and RNA.

[0186] By “amino acid substitution” or “substitution” herein is meant the replacement of an amino acid at a particular position in a parent polypeptide sequence with a different amino acid. In particular, in some embodiments, the substitution is to an amino acid that is not naturally occurring at the particular position, either not naturally occurring within the organism or in any organism. For example, the substitution N297A refers to a variant polypeptide, in this case an Fc variant, in which the asparagine at position 297 is replaced with alanine. For clarity, a protein which has been engineered to change the nucleic acid coding sequence but not change the starting amino acid (for example exchanging CGG (encoding arginine) to CGA (still encoding arginine) to increase host organism expression levels) is not an “amino acid substitution”; that is, despite the creation of a new gene encoding the same protein, if the protein has the same amino acid at the particular position that it started with, it is not an amino acid substitution.

[0187] By “amino acid insertion” or “insertion” as used herein is meant the addition of an amino acid sequence at a particular position in a parent polypeptide sequence. For example, −233E or 233E designates an insertion of glutamic acid after position 233 and before position 234. Additionally, −233ADE or A233ADE designates an insertion of AlaAspGlu after position 233 and before position 234.

[0188] By “amino acid deletion” or “deletion” as used herein is meant the removal of an amino acid sequence at a particular position in a parent polypeptide sequence. For example, E233- or E233 #, E233( ) or E233del designates a deletion of glutamic acid at position 233. Additionally, EDA233- or EDA233 # designates a deletion of the sequence GluAspAla that begins at position 233.

[0189] By “variant protein” or “protein variant”, or “variant” as used herein is meant a protein that differs from that of a parent protein by virtue of at least one amino acid modification. Protein variant may refer to the protein itself, a composition comprising the protein, or the amino sequence that encodes it. Preferably, the protein variant has at least one amino acid modification compared to the parent protein, e.g. from about one to about seventy amino acid modifications, and preferably from about one to about five amino acid modifications compared to the parent. As described below, in some embodiments the parent polypeptide, for example an Fc parent polypeptide, is a human wild type sequence, such as the Fc region from IgG1, IgG2, IgG3 or IgG4, although human sequences with variants can also serve as “parent polypeptides”. The protein variant sequence herein will preferably possess at least about 80% identity with a parent protein sequence, and most preferably at least about 90% identity, more preferably at least about 95-98-99% identity. Variant protein can refer to the variant protein itself, compositions comprising the protein variant, or the DNA sequence that encodes it. Accordingly, by “antibody variant” or “variant antibody” as used herein is meant an antibody that differs from a parent antibody by virtue of at least one amino acid modification, “IgG variant” or “variant IgG” as used herein is meant an antibody that differs from a parent IgG (again, in many cases, from a human IgG sequence) by virtue of at least one amino acid modification, and “immunoglobulin variant” or “variant immunoglobulin” as used herein is meant an immunoglobulin sequence that differs from that of a parent immunoglobulin sequence by virtue of at least one amino acid modification. “Fc variant” or “variant Fc” as used herein is meant a protein comprising an amino acid modification in an Fc domain. The Fc variants of the present invention are defined according to the amino acid modifications that compose them. Thus, for example, S241P or S228P is a hinge variant with the substitution proline at position 228 relative to the parent IgG4 hinge polypeptide, wherein the numbering S228P is according to the EU index and the S241P is the Kabat numbering. The EU index or EU index as in Kabat or EU numbering scheme refers to the numbering of the EU antibody (Edelman et al., 1969, Proc Natl Acad Sci USA 63:78-85, hereby entirely incorporated by reference.) The modification can be an addition, deletion, or substitution. Substitutions can include naturally occurring amino acids and, in some cases, synthetic amino acids. Examples include U.S. Pat. No. 6,586,207; WO 98/48032; WO 03/073238; US2004-0214988A1; WO 05/35727A2; WO 05/74524A2; J. W. Chin et al., (2002), Journal of the American Chemical Society 124:9026-9027; J. W. Chin, & P. G. Schultz, (2002), ChemBioChem 11:1135-1137; J. W. Chin, et al., (2002), PICAS United States of America 99:11020-11024; and, L. Wang, & P. G. Schultz, (2002), Chem. 1-10, all entirely incorporated by reference.

[0190] As used herein, “protein” herein is meant at least two covalently attached amino acids, which includes proteins, polypeptides, oligopeptides and peptides. The peptidyl group may comprise naturally occurring amino acids and peptide bonds, or synthetic peptidomimetic structures, i.e. “analogs”, such as peptoids (see Simon et al., PNAS USA 89(20):9367 (1992), entirely incorporated by reference). The amino acids may either be naturally occurring or synthetic (e.g. not an amino acid that is coded for by DNA); as will be appreciated by those in the art. For example, homo-phenylalanine, citrulline, ornithine and noreleucine are considered synthetic amino acids for the purposes of the invention, and both D- and L-(R or S) configured amino acids may be utilized. The variants of the present invention may comprise modifications that include the use of synthetic amino acids incorporated using, for example, the technologies developed by Schultz and colleagues, including but not limited to methods described by Cropp & Shultz, 2004, Trends Genet. 20(12):625-30, Anderson et al., 2004, Proc Natl Acad Sci USA 101 (2):7566-71, Zhang et al., 2003, 303(5656):371-3, and Chin et al., 2003, Science 301(5635):964-7, all entirely incorporated by reference. In addition, polypeptides may include synthetic derivatization of one or more side chains or termini, glycosylation, PEGylation, circular permutation, cyclization, linkers to other molecules, fusion to proteins or protein domains, and addition of peptide tags or labels.

[0191] By “residue” as used herein is meant a position in a protein and its associated amino acid identity. For example, Asparagine 297 (also referred to as Asn297 or N297) is a residue at position 297 in the human antibody IgG1.

[0192] By “Fab” or “Fab region” as used herein is meant the polypeptide that comprises the VH, CH1, VL, and CL immunoglobulin domains. Fab may refer to this region in isolation, or this region in the context of a full length antibody or antibody fragment.

[0193] By “Fv” or “Fv fragment” or “Fv region” as used herein is meant a polypeptide that comprises the VL and VH domains of a single antibody. As will be appreciated by those in the art, these generally are made up of two chains.

[0194] By “single chain Fv” or “scFv” herein is meant a variable heavy domain covalently attached to a variable light domain, generally using a scFv linker as discussed herein, to form a scFv or scFv domain. A scFv domain can be in either orientation from N- to C-terminus (vh-linker-vl or vl-linker-vh). In general, the linker is a scFv linker as is generally known in the art, with the linker peptide predominantly including the following amino acid residues: Gly, Ser, Ala, or Thr. The linker peptide should have a length that is adequate to link two molecules in such a way that they assume the correct conformation relative to one another so that they retain the desired activity. In one embodiment, the linker is from about 1 to 50 amino acids in length, preferably about 1 to 30 amino acids in length. In one embodiment, linkers of 1 to 20 amino acids in length may be used, with from about 5 to about 10 amino acids finding use in some embodiments. Useful linkers include glycine-serine polymers, including for example (GS)n, (GSGGS)n, (GGGGS)n, and (GGGS)n, where n is an integer of at least one (and generally from 3 to 4), glycine-alanine polymers, alanine-serine polymers, and other flexible linkers. Alternatively, a variety of nonproteinaceous polymers, including but not limited to polyethylene glycol (PEG), polypropylene glycol, polyoxyalkylenes, or copolymers of polyethylene glycol and polypropylene glycol, may find use as linkers, that is may find use as linkers.

[0195] By “IgG subclass modification” or “isotype modification” as used herein is meant an amino acid modification that converts one amino acid of one IgG isotype to the corresponding amino acid in a different, aligned IgG isotype. For example, because IgG1 comprises a tyrosine and IgG2 a phenylalanine at EU position 296, a F296Y substitution in IgG2 is considered an IgG subclass modification. Similarly, because IgG1 has a proline at position 241 and IgG4 has a serine there, an IgG4 molecule with a S241P is considered an IgG subclass modification. Note that subclass modifications are considered amino acid substitutions herein.

[0196] By “non-naturally occurring modification” as used herein is meant an amino acid modification that is not isotypic. For example, because none of the IgGs comprise an asparagine at position 297, the substitution N297A in IgG1, IgG2, IgG3, or IgG4 (or hybrids thereof) is considered a non-naturally occurring modification.

[0197] By “amino acid” and “amino acid identity” as used herein is meant one of the 20 naturally occurring amino acids that are coded for by DNA and RNA.

[0198] By “effector function” as used herein is meant a biochemical event that results from the interaction of an antibody Fc region with an Fc receptor or ligand. Effector functions include but are not limited to ADCC, ADCP, and CDC. In many cases, it is desirable to ablate most or all effector functions using either different IgG isotypes (e.g. IgG4) or amino acid substitutions in the Fc domain; however, preserving binding to the FcRn receptor is desirable, as this contributes to the half-life of the antibodies in human serum.

[0199] By “IgG Fc ligand” as used herein is meant a molecule, preferably a polypeptide, from any organism that binds to the Fc region of an IgG antibody to form an Fc/Fc ligand complex. Fc ligands include but are not limited to FcγRIs, FcγRIIs, FcγRIIIs, FcRn, C1q, C3, mannan binding lectin, mannose receptor, staphylococcal protein A, streptococcal protein G, and viral FcγR. Fc ligands also include Fc receptor homologs (FcRH), which are a family of Fc receptors that are homologous to the FcγRs (Davis et al., 2002, Immunological Reviews 190:123-136, entirely incorporated by reference). Fc ligands may include undiscovered molecules that bind Fc. Particular IgG Fc ligands are FcRn and Fc gamma receptors. By “Fc ligand” as used herein is meant a molecule, preferably a polypeptide, from any organism that binds to the Fc region of an antibody to form an Fc/Fc ligand complex.

[0200] By “parent polypeptide” as used herein is meant a starting polypeptide that is subsequently modified to generate a variant. The parent polypeptide may be a naturally occurring polypeptide, or a variant or engineered version of a naturally occurring polypeptide. Parent polypeptide may refer to the polypeptide itself, compositions that comprise the parent polypeptide, or the amino acid sequence that encodes it. Accordingly, by “parent immunoglobulin” as used herein is meant an unmodified immunoglobulin polypeptide that is modified to generate a variant, and by “parent antibody” as used herein is meant an unmodified antibody that is modified to generate a variant antibody. It should be noted that “parent antibody” includes known commercial, recombinantly produced antibodies as outlined below.

[0201] By “Fc” or “Fc region” or “Fc domain” as used herein is meant the polypeptide comprising the constant region of an antibody excluding the first constant region immunoglobulin domain and in some cases, part of the hinge. Thus Fc refers to the last two constant region immunoglobulin domains of IgA, IgD, and IgG, the last three constant region immunoglobulin domains of IgE and IgM, and the flexible hinge N-terminal to these domains. For IgA and IgM, Fc may include the J chain. For IgG, the Fc domain comprises immunoglobulin domains Cγ2 and Cγ3 (Cγ2 and Cγ3) and the lower hinge region between Cγ1 (Cγ1) and Cγ2 (Cγ2). Although the boundaries of the Fc region may vary, the human IgG heavy chain Fc region is usually defined to include residues C226 or P230 to its carboxyl-terminus, wherein the numbering is according to the EU index as in Kabat. In some embodiments, as is more fully described below, amino acid modifications are made to the Fc region, for example to alter binding to one or more FcγR receptors or to the FcRn receptor.

[0202] By “heavy constant region” herein is meant the CH1-hinge-CH2-CH3 portion of an antibody.

[0203] By “position” as used herein is meant a location in the sequence of a protein. Positions may be numbered sequentially, or according to an established format, for example the EU index for antibody numbering.

[0204] By “target antigen” as used herein is meant the molecule that is bound specifically by the variable region of a given antibody. The target antigen of interest herein is TIGIT, usually human TIGIT and optionally cyno TIGIT, the sequences of which are shown in.

[0205] By “target cell” as used herein is meant a cell that expresses a target antigen.

[0206] By “variable region” as used herein is meant the region of an immunoglobulin that comprises one or more Ig domains substantially encoded by any of the Vκ (V.kappa), Vλ (V.lamda), and/or VH genes that make up the kappa, lambda, and heavy chain immunoglobulin genetic loci respectively.

[0207] By “wild type or WT” herein is meant an amino acid sequence or a nucleotide sequence that is found in nature, including allelic variations. A WT protein has an amino acid sequence or a nucleotide sequence that has not been intentionally modified.

[0208] The antibodies of the present invention are generally isolated or recombinant. “Isolated,” when used to describe the various polypeptides disclosed herein, means a polypeptide that has been identified and separated and/or recovered from a cell or cell culture from which it was expressed. Ordinarily, an isolated polypeptide will be prepared by at least one purification step. An “isolated antibody,” refers to an antibody which is substantially free of other antibodies having different antigenic specificities. “Recombinant” means the antibodies are generated using recombinant nucleic acid techniques in exogeneous host cells.

[0209] “Specific binding” or “specifically binds to” or is “specific for” a particular antigen or an epitope means binding that is measurably different from a non-specific interaction. Specific binding can be measured, for example, by determining binding of a molecule compared to binding of a control molecule, which generally is a molecule of similar structure that does not have binding activity. For example, specific binding can be determined by competition with a control molecule that is similar to the target.

[0210] Specific binding for a particular antigen or an epitope can be exhibited, for example, by an antibody having a KD for an antigen or epitope of at least about 10⁻⁹ M, at least about 10⁻¹⁰ M, at least about 10⁻¹¹ M, at least about 10⁻¹² M, at least about 10⁻¹³ M, at least about 10⁻¹⁴ M, at least about 10⁻¹⁵ M, where KD refers to a dissociation rate of a particular antibody-antigen interaction. Typically, an antibody that specifically binds an antigen will have a KD that is 20-, 50-, 100-, 500-, 1000-, 5,000-, 10,000- or more times greater for a control molecule relative to the antigen or epitope.

[0211] Also, specific binding for a particular antigen or an epitope can be exhibited, for example, by an antibody having a KA or Ka for an antigen or epitope of at least 20-, 50-, 100-, 500-, 1000-, 5,000-, 10,000- or more times greater for the epitope relative to a control, where KA or Ka refers to an association rate of a particular antibody-antigen interaction. Binding affinity is generally measured using surface plasmon resonance (e.g. Biacore assay) and flow cytometry with antigen-expressing cells.

### V. ANTIBODIES

[0212] As is discussed below, the term “antibody” is used generally. Traditional antibody structural units typically comprise a tetramer. Each tetramer is typically composed of two identical pairs of polypeptide chains, each pair having one “light” (typically having a molecular weight of about 25 kDa) and one “heavy” chain (typically having a molecular weight of about 50-70 kDa). Human light chains are classified as kappa and lambda light chains. The present invention is directed to antibodies that generally are based on the IgG class, which has several subclasses, including, but not limited to IgG1, IgG2, IgG3, and IgG4. In general, IgG1, IgG2 and IgG4 are used more frequently than IgG3. It should be noted that IgG1 has different allotypes with polymorphisms at 356 (D or E) and 358 (L or M). The sequences depicted herein use the 356D/358M allotype, however the other allotype is included herein. That is, any sequence inclusive of an IgG1 Fc domain included herein can have 356E/358L replacing the 356D/358M allotype.

[0213] The amino-terminal portion of each chain includes a variable region of about 100 to 110 or more amino acids primarily responsible for antigen recognition, generally referred to in the art and herein as the “Fv domain” or “Fv region”. In the variable region, three loops are gathered for each of the V domains of the heavy chain and light chain to form an antigen-binding site. Each of the loops is referred to as a complementarity-determining region (hereinafter referred to as a “CDR”), in which the variation in the amino acid sequence is most significant. “Variable” refers to the fact that certain segments of the variable region differ extensively in sequence among antibodies. Variability within the variable region is not evenly distributed. Instead, the V regions consist of relatively invariant stretches called framework regions (FRs) of 15-30 amino acids separated by shorter regions of extreme variability called “hypervariable regions” that are each 9-15 amino acids long or longer.

[0214] Each VH and VL is composed of three hypervariable regions (“complementary determining regions,” “CDRs”) and four FRs, arranged from amino-terminus to carboxy-terminus in the following order: FR1-CDR1-FR2-CDR2-FR3-CDR3-FR4.

[0215] The hypervariable region generally encompasses amino acid residues from about amino acid residues 24-34 (LCDR1; “L” denotes light chain), 50-56 (LCDR2) and 89-97 (LCDR3) in the light chain variable region and around about 31-35B (HCDR1; “H” denotes heavy chain), 50-65 (HCDR2), and 95-102 (HCDR3) in the heavy chain variable region; Kabat et al., SEQUENCES OF PROTEINS OF IMMUNOLOGICAL INTEREST, 5th Ed. Public Health Service, National Institutes of Health, Bethesda, Md. (1991) and/or those residues forming a hypervariable loop (e.g. residues 26-32 (LCDR1), 50-52 (LCDR2) and 91-96 (LCDR3) in the light chain variable region and 26-32 (HCDR1), 53-55 (HCDR2) and 96-101 (HCDR3) in the heavy chain variable region; Chothia and Lesk (1987) J. Mol. Biol. 196:901-917. Specific CDRs of the invention are described below.

[0216] As will be appreciated by those in the art, the exact numbering and placement of the CDRs can be different among different numbering systems. However, it should be understood that the disclosure of a variable heavy and/or variable light sequence includes the disclosure of the associated (inherent) CDRs. Accordingly, the disclosure of each variable heavy region is a disclosure of the vhCDRs (e.g. vhCDR1, vhCDR2 and vhCDR3) and the disclosure of each variable light region is a disclosure of the vlCDRs (e.g. vlCDR1, vlCDR2 and vlCDR3). A useful comparison of CDR numbering is as below, see Lafranc et al., Dev. Comp. Immunol. 27(1):55-77 (2003):

| | Kabat + | | | | | |
|---|---|---|---|---|---|---|
| | Clothia | IMGT | Kabat | AbM | Chothia | Contact |
| vhCDR1 | 26-35 | 27-38 | 31-35 | 26-35 | 26-32 | 30-35 |
| vhCDR2 | 50-65 | 56-65 | 50-65 | 50-58 | 53-55 | 47-58 |
| vhCDR3 | 95-102 | 105-117 | 95-102 | 95-102 | 96-101 | 93-101 |
| vlCDR1 | 24-34 | 27-38 | 24-34 | 24-34 | 26-32 | 30-36 |
| vlCDR2 | 50-56 | 56-65 | 50-56 | 50-56 | 50-52 | 46-55 |
| vlCDR3 | 89-97 | 105-117 | 89-97 | 89-97 | 91-96 | 89-96 |

[0217] Throughout the present specification, the Kabat numbering system is generally used when referring to a residue in the variable domain (approximately, residues 1-107 of the light chain variable region and residues 1-113 of the heavy chain variable region) and the hinge and the EU numbering system for Fc regions (e.g, Kabat et al., supra (1991)).

[0218] The present invention provides a large number of different CDR sets. In this case, a “full CDR set” comprises the three variable light and three variable heavy CDRs, e.g. a vlCDR1, vlCDR2, vlCDR3, vhCDR1, vhCDR2 and vhCDR3. These can be part of a larger variable light or variable heavy domain, respectfully. In addition, as more fully outlined herein, the variable heavy and variable light domains can be on separate polypeptide chains, when a heavy and light chain is used, or on a single polypeptide chain in the case of scFv sequences.

[0219] The CDRs contribute to the formation of the antigen-binding, or more specifically, epitope binding site of antibodies. “Epitope” refers to a determinant that interacts with a specific antigen binding site in the variable region of an antibody molecule known as a paratope. Epitopes are groupings of molecules such as amino acids or sugar side chains and usually have specific structural characteristics, as well as specific charge characteristics. A single antigen may have more than one epitope.

[0220] The epitope may comprise amino acid residues directly involved in the binding (also called immunodominant component of the epitope) and other amino acid residues, which are not directly involved in the binding, such as amino acid residues which are effectively blocked by the specifically antigen binding peptide; in other words, the amino acid residue is within the footprint of the specifically antigen binding peptide.

[0221] Epitopes may be either conformational or linear. A conformational epitope is produced by spatially juxtaposed amino acids from different segments of the linear polypeptide chain. A linear epitope is one produced by adjacent amino acid residues in a polypeptide chain. Conformational and nonconformational epitopes may be distinguished in that the binding to the former but not the latter is lost in the presence of denaturing solvents.

[0222] An epitope typically includes at least 3, and more usually, at least 5 or 8-10 amino acids in a unique spatial conformation. Antibodies that recognize the same epitope can be verified in a simple immunoassay showing the ability of one antibody to block the binding of another antibody to a target antigen, for example “binning.” As outlined below, the invention not only includes the enumerated antigen binding domains and antibodies herein, but those that compete for binding with the epitopes bound by the enumerated antigen binding domains.

[0223] The carboxy-terminal portion of each chain defines a constant region primarily responsible for effector function. Kabat et al. collected numerous primary sequences of the variable regions of heavy chains and light chains. Based on the degree of conservation of the sequences, they classified individual primary sequences into the CDR and the framework and made a list thereof (see SEQUENCES OF IMMUNOLOGICAL INTEREST, 5th edition, NIH publication, No. 91-3242, E. A. Kabat et al., entirely incorporated by reference).

[0224] In the IgG subclass of immunoglobulins, there are several immunoglobulin domains in the heavy chain. By “immunoglobulin (Ig) domain” herein is meant a region of an immunoglobulin having a distinct tertiary structure. Of interest in the present invention are the heavy chain domains, including, the constant heavy (CH) domains and the hinge domains. In the context of IgG antibodies, the IgG isotypes each have three CH regions. Accordingly, “CH” domains in the context of IgG are as follows: “CH1” refers to positions 118-220 according to the EU index as in Kabat. “CH2” refers to positions 237-340 according to the EU index as in Kabat, and “CH3” refers to positions 341-447 according to the EU index as in Kabat. As shown herein and described below, the pI variants can be in one or more of the CH regions, as well as the hinge region, discussed below.

[0225] Another type of Ig domain of the heavy chain is the hinge region. By “hinge” or “hinge region” or “antibody hinge region” or “immunoglobulin hinge region” herein is meant the flexible polypeptide comprising the amino acids between the first and second constant domains of an antibody. Structurally, the IgG CH1 domain ends at EU position 220, and the IgG CH2 domain begins at residue EU position 237. Thus for IgG the antibody hinge is herein defined to include positions 221 (D221 in IgG1) to 236 (G236 in IgG1), wherein the numbering is according to the EU index as in Kabat. In some embodiments, for example in the context of an Fc region, the lower hinge is included, with the “lower hinge” generally referring to positions 226 or 230.

[0226] The light chain generally comprises two domains, the variable light domain (containing the light chain CDRs and together with the variable heavy domains forming the Fv region), and a constant light chain region (often referred to as CL or Cκ).

[0227] Another region of interest for additional substitutions, outlined below, is the Fc region.

### A. Chimeric and Humanized Antibodies

[0228] In some embodiments, the antibodies herein can be derived from a mixture from different species, e.g. a chimeric antibody and/or a humanized antibody. In general, both “chimeric antibodies” and “humanized antibodies” refer to antibodies that combine regions from more than one species. For example, “chimeric antibodies” traditionally comprise variable region(s) from a mouse (or rat, in some cases) and the constant region(s) from a human. “Humanized antibodies” generally refer to non-human antibodies that have had the variable-domain framework regions swapped for sequences found in human antibodies. Generally, in a humanized antibody, the entire antibody, except the CDRs, is encoded by a polynucleotide of human origin or is identical to such an antibody except within its CDRs. The CDRs, some or all of which are encoded by nucleic acids originating in a non-human organism, are grafted into the beta-sheet framework of a human antibody variable region to create an antibody, the specificity of which is determined by the engrafted CDRs. The creation of such antibodies is described in, e.g., WO 92/11018, Jones, 1986, Nature 321:522-525, Verhoeyen et al., 1988, Science 239:1534-1536, all entirely incorporated by reference. “Backmutation” of selected acceptor framework residues to the corresponding donor residues is often required to regain affinity that is lost in the initial grafted construct (U.S. Pat. Nos. 5,530,101; 5,585,089; 5,693,761; 5,693,762; 6,180,370; 5,859,205; 5,821,337; 6,054,297; 6,407,213, all entirely incorporated by reference). The humanized antibody optimally also will comprise at least a portion of an immunoglobulin constant region, typically that of a human immunoglobulin, and thus will typically comprise a human Fc region. Humanized antibodies can also be generated using mice with a genetically engineered immune system. Roque et al., 2004, Biotechnol. Prog. 20:639-654, entirely incorporated by reference. A variety of techniques and methods for humanizing and reshaping non-human antibodies are well known in the art (See Tsurushita & Vasquez, 2004, Humanization of Monoclonal Antibodies, Molecular Biology of B Cells, 533-545, Elsevier Science (USA), and references cited therein, all entirely incorporated by reference). Humanization methods include but are not limited to methods described in Jones et al., 1986, Nature 321:522-525; Riechmann et al., 1988; Nature 332:323-329; Verhoeyen et al., 1988, Science, 239:1534-1536; Queen et al., 1989, Proc Natl Acad Sci, USA 86:10029-33; He et al., 1998, J. Immunol. 160: 1029-1035; Carter et al., 1992, Proc Natl Acad Sci USA 89:4285-9, Presta et al., 1997, Cancer Res. 57(20):4593-9; Gorman et al., 1991, Proc. Natl. Acad. Sci. USA 88:4181-4185; O'Connor et al., 1998, Protein Eng 11:321-8, all entirely incorporated by reference. Humanization or other methods of reducing the immunogenicity of nonhuman antibody variable regions may include resurfacing methods, as described for example in Roguska et al., 1994, Proc. Natl. Acad. Sci. USA 91:969-973, entirely incorporated by reference.

[0229] In certain embodiments, the antibodies of the invention comprise a heavy chain variable region from a particular germline heavy chain immunoglobulin gene and/or a light chain variable region from a particular germline light chain immunoglobulin gene (with optional mutations as is generally described herein). For example, such antibodies may comprise or consist of a human antibody comprising heavy or light chain variable regions that are “the product of” or “derived from” a particular germline sequence. A human antibody that is “the product of” or “derived from” a human germline immunoglobulin sequence can be identified as such by comparing the amino acid sequence of the human antibody to the amino acid sequences of human germline immunoglobulins and selecting the human germline immunoglobulin sequence that is closest in sequence (i.e., greatest % identity) to the sequence of the human antibody. A human antibody that is “the product of” or “derived from” a particular human germline immunoglobulin sequence may contain amino acid differences as compared to the germline sequence, due to, for example, naturally-occurring somatic mutations or intentional introduction of site-directed mutation. However, a humanized antibody typically is at least 90% identical in amino acids sequence to an amino acid sequence encoded by a human germline immunoglobulin gene and contains amino acid residues that identify the antibody as being derived from human sequences when compared to the germline immunoglobulin amino acid sequences of other species (e.g., murine germline sequences). In certain cases, a humanized antibody may be at least 95, 96, 97, 98 or 99%, or even at least 96%, 97%, 98%, or 99% identical in amino acid sequence to the amino acid sequence encoded by the germline immunoglobulin gene. Typically, a humanized antibody derived from a particular human germline sequence will display no more than 10-20 amino acid differences from the amino acid sequence encoded by the human germline immunoglobulin gene. In certain cases, the humanized antibody may display no more than 5, or even no more than 4, 3, 2, or 1 amino acid difference from the amino acid sequence encoded by the germline immunoglobulin gene (again, prior to the introduction of any variants herein; that is, the number of variants is generally low, prior to the introduction of the variants of the invention).

[0230] In one embodiment, the parent antibody has been affinity matured, as is known in the art. Structure-based methods may be employed for humanization and affinity maturation, for example as described in U.S. Ser. No. 11/004,590. Selection based methods may be employed to humanize and/or affinity mature antibody variable regions, including but not limited to methods described in Wu et al., 1999, J. Mol. Biol. 294:151-162; Baca et al., 1997, J. Biol. Chem. 272(16):10678-10684; Rosok et al., 1996, J. Biol. Chem. 271(37): 22611-22618; Rader et al., 1998, Proc. Natl. Acad. Sci. USA 95: 8910-8915; Krauss et al., 2003, Protein Engineering 16(10):753-759, all entirely incorporated by reference. Other humanization methods may involve the grafting of only parts of the CDRs, including but not limited to methods described in U.S. Ser. No. 09/810,510; Tan et al., 2002, J. Immunol. 169:1119-1125; De Pascalis et al., 2002, J. Immunol. 169:3076-3084, all entirely incorporated by reference.

### B. Specific Anti-TIGIT Antibodies

[0231] The invention provides antigen binding domains, including full length antibodies, which contain a number of specific, enumerated sets of 6 CDRs and defined variable heavy (vh, VH or V_{H}) and variable light (vl, VL or V_{L}), that bind to TIGIT.

[0232] In one embodiment, the anti-TIGIT antibody is an antibody comprising a set of six CDRs (vhCDR1, vhCDR2, vhCDR3, vlCDR1, vlCDR2 and vlCDR3) from CPA.9.083.H4(S241P) as depicted in FIG. 3. In one embodiment, the anti-TIGIT antibody is an antibody comprising the variable heavy (vh) and variable light (vl) domains from CPA.9.083.H4(S241P) as depicted in FIG. 3, linked to a human IgG constant domain of IgG1, IgG2, IgG3, IgG4 and IgG4(S241P). In one embodiment, the anti-TIGIT antibody is CPA.9.083.H4(S241P).

[0233] In one embodiment, the anti-TIGIT antibody is an antibody comprising a set of six CDRs (vhCDR1, vhCDR2, vhCDR3, vlCDR1, vlCDR2 and vlCDR3) from CPA.9.086.H4(S241P) as depicted in FIG. 3. In one embodiment, the anti-TIGIT antibody is an antibody comprising the variable heavy (vh) and variable light (vl) domains from CPA.9.086.H4(S241P) as depicted in FIG. 3, linked to a human IgG constant domain of IgG1, IgG2, IgG3, IgG4 and IgG4(S241P). In one embodiment, the anti-TIGIT antibody is CPA.9.086.H4(S241P).

[0234] In one embodiment, the anti-TIGIT antibody is an antibody comprising a set of six CDRs (vhCDR1, vhCDR2, vhCDR3, vlCDR1, vlCDR2 and vlCDR3) from CHA.9.547.7.H4(S241P) as depicted in FIG. 3. In one embodiment, the anti-TIGIT antibody is an antibody comprising the variable heavy (vh) and variable light (vl) domains from CHA.9.547.7.H4(S241P) as depicted in FIG. 3, linked to a human IgG constant domain of IgG1, IgG2, IgG3, IgG4 and IgG4(S241P). In one embodiment, the anti-TIGIT antibody is CHA.9.547.7.H4(S241P).

[0235] In one embodiment, the anti-TIGIT antibody is an antibody comprising a set of six CDRs (vhCDR1, vhCDR2, vhCDR3, vlCDR1, vlCDR2 and vlCDR3) from CHA.9.547.13.H4(S241P) as depicted in FIG. 3. In one embodiment, the anti-TIGIT antibody is an antibody comprising the variable heavy (vh) and variable light (vl) domains from CHA.9.547.13.H4(S241P) as depicted in FIG. 3, linked to a human IgG constant domain of IgG1, IgG2, IgG3, IgG4 and IgG4(S241P). In one embodiment, the anti-TIGIT antibody is CHA.9.547.13.H4(S241P).

[0236] Further anti-TIGIT antibodies that find use in combinations with anti-PVRIG antibodies as outlined herein are those in FIG. 4 of U.S. Ser. No. 62/513,916, entitled “Anti-TIGIT Antibodies and Methods of Use”, filed on Jun. 1, 2017, by assignee Compugen, as well as those included in FIG. 3.

### C. Additional Anti-TIGIT Antibodies for Use in Combination Therapy

[0237] Additional anti-TIGIT antibodies that can be used in combination with anti-PVRIG antibodies and optionally anti-PD-1 antibodies as outlined herein are also included. As discussed more fully below, anti-TIGIT antibodies show particular efficacy in combination with anti-PVRIG antibodies. Thus, in some embodiments, alternative anti-TIGIT antibodies are used in combination with anti-PVRIG antibodies outlined herein, and in particular either of CHA.7.538.1.2.H4(S241P) or CHA.7.518.1.H4(S241P).

[0238] Accordingly, in one embodiment, anti-TIGIT antibodies as outlined in U.S. Pat. No. 9,499,596, (hereby incorporated by reference in its entirety and specifically for the SEQ ID NO:s listed below) can be combined with CHA.7.538.1.2.H4(S241P) or CHA.7.518.1.H4(S241P). Specifically, an anti-TIGIT antibody having a light chain sequence of SEQ ID NO:21 and a heavy chain sequence of SEQ ID NO:22 (from U.S. Pat. No. 9,499,596) can be combined with CHA.7.538.1.2.H4(S241P) or CHA.7.518.1.H4(S241P). Additionally, an anti-TIGIT antibody having a light chain sequence of SEQ ID NO:29 and a heavy chain sequence of SEQ ID NO:30 (from U.S. Pat. No. 9,499,596) can be combined with CHA.7.538.1.2.H4(S241P) or CHA.7.518.1.H4(S241P).

[0239] Similarly, in one embodiment, anti-TIGIT antibodies as outlined in WO 2016/191643 (hereby incorporated by reference in its entirety and specifically for the SEQ ID NO:s listed below, and in particular for the sequences of the OMP-313M32 antibody) can be combined with CHA.7.538.1.2.H4(S241P) or CHA.7.518.1.H4(S241P). Specifically, an anti-TIGIT antibody having a light chain sequence of SEQ ID NO:72 and a heavy chain sequence of SEQ ID NO:70 (from WO 2016/191643) can be combined with CHA.7.538.1.2.H4(S241P) or CHA.7.518.1.H4(S241P).

[0240] Accordingly, in one embodiment, anti-TIGIT antibodies as outlined in WO 2017/053748 (hereby incorporated by reference in its entirety and specifically for the SEQ ID NO:s listed below) can be combined with CHA.7.538.1.2.H4(S241P) or CHA.7.518.1.H4(S241P). Specifically, an anti-TIGIT antibody having a variable light chain sequence of SEQ ID NO:36 and a variable heavy chain sequence of SEQ ID NO:34 (from WO 2017/053748) can be combined with CHA.7.538.1.2.H4(S241P) or CHA.7.518.1.H4(S241P). Additionally, an anti-TIGIT antibody having a variable light chain sequence of SEQ ID NO:36 and a variable heavy chain sequence of SEQ ID NO:35 (from WO 2017/053748) can be combined with CHA.7.538.1.2.H4(S241P) or CHA.7.518.1.H4(S241P). Additionally, an anti-TIGIT antibody having a variable light chain sequence of SEQ ID NO:38 and a variable heavy chain sequence of SEQ ID NO:37 (from WO 2017/053748) can be combined with CHA.7.538.1.2.H4(S241P) or CHA.7.518.1.H4(S241P). Additionally, an anti-TIGIT antibody having a variable light chain sequence of SEQ ID NO:40 and a variable heavy chain sequence of SEQ ID NO:39 (from WO 2017/053748) can be combined with CHA.7.538.1.2.H4(S241P) or CHA.7.518.1.H4(S241P). In one embodiment, anti-TIGIT antibodies include the Genentech antibody, MTIG7192A, currently in clinical trials (see, the World Wide Web at clinicaltrials.gov/ct2/show/NCT02794571?term=MTIG7192A&rank=1). In one embodiment, an MTIG7192A anti-TIGIT antibody can be combined with CHA.7.538.1.2.H4(S241P) or CHA.7.518.1.H4(S241P).

[0241] Similarly, in one embodiment, anti-TIGIT antibodies as outlined in WO2016/191643 (hereby incorporated by reference in its entirety and specifically for the SEQ ID NO:s listed below, and in particular for the sequences of the OMP-313M32 antibody can be combined with CHA.7.538.1.2.H4(S241P) or CHA.7.518.1.H4(S241P). Specifically, an anti-TIGIT antibody having a light chain sequence of SEQ ID NO:72 and a heavy chain sequence of SEQ ID NO:70 (from WO2016/191643) can be combined with CHA.7.538.1.2.H4(S241P) or CHA.7.518.1.H4(S241P). In one embodiment, anti-TIGIT antibodies include the Oncomed antibody, OMP-313M32, currently in clinical trials (see, the World Wide Web at clinicaltrials.gov/ct2/show/NCT03119428?term=OMP-313M32&rank=1). In one embodiment, an OMP-313M32 anti-TIGIT antibody can be combined with CHA.7.538.1.2.H4(S241P) or CHA.7.518.1.H4(S241P).

[0242] Additionally, in one embodiment, anti-TIGIT antibodies as outlined in WO 2016/028656 (hereby incorporated by reference in its entirety and specifically for the SEQ ID NO:s listed below, and in particular for the sequences of the MEB125.31C6.A1.205 VH4/VL1 (VH of SEQ ID NO:127, VL of SEQ ID NO:130 with a human IgG1 constant domain), MEB 125.31C6.A1.205 VH5/VL4 (VH of SEQ ID NO:128, VL of SEQ ID NO:133 and a human IgG1 constant region) and MEB125.31.C6, A1.205 VH5/VL3 (VH of SEQ ID NO:128, VL of SEQ ID NO:132 and a human IgG1 constant region) antibodies) can be combined with CHA.7.538.1.2.H4(S241P) or CHA.7.518.1.H4(S241P). Specifically, an anti-TIGIT antibody MEB125.31C6.A1.205 VH4/VL1 (VH of SEQ ID NO:127, VL of SEQ ID NO:130 with a human IgG1 constant domain) (from WO 2016/028656) can be combined with CHA.7.538.1.2.H4(S241P) or CHA.7.518.1.H4(S241P). Specifically, an anti-TIGIT antibody MEB 125.31C6.A1.205 VH5/VL4 (VH of SEQ ID NO:128, VL of SEQ ID NO:133 and a human IgG1 constant region (from WO 2016/028656) can be combined with CHA.7.538.1.2.H4(S241P) or CHA.7.518.1.H4(S241P). Specifically, an anti-TIGIT antibody MEB125.31.C6.A1.205 VH5/VL3 (VH of SEQ ID NO:128, VL of SEQ ID NO:132 and a human IgG1 constant region) (from WO2016/028656) can be combined with CHA.7.538.1.2.H4(S241P) or CHA.7.518.1.H4(S241P). Specifically, an anti-TIGIT antibody comprising the VH of SEQ ID NO:7, VL of SEQ ID NO:8 and a human IgG1 constant region (from WO 2016/028656) can be combined with CHA.7.538.1.2.H4(S241P) or CHA.7.518.1.H4(S241P). Specifically, an anti-TIGIT antibody comprising the VH of SEQ ID NO:63, VL of SEQ ID NO:64 and a human IgG1 constant region (from WO 2016/028656) can be combined with CHA.7.538.1.2.H4(S241P) or CHA.7.518.1.H4(S241P). Specifically, an anti-TIGIT antibody comprising the VH of SEQ ID NO:94, VL of SEQ ID NO:95 and a human IgG1 constant region (from WO 2016/028656) can be combined with CHA.7.538.1.2.H4(S241P) or CHA.7.518.1.H4(S241P). Specifically, an anti-TIGIT antibody comprising the VH of SEQ ID NO:126, VL of SEQ ID NO:131 and a human IgG1 constant region (from WO 2016/028656) can be combined with CHA.7.538.1.2.H4(S241P) or CHA.7.518.1.H4(S241P). Specifically, an anti-TIGIT antibody comprising the VH of SEQ ID NO: 128, VL of SEQ ID NO:131 and a human IgG1 constant region (from WO 2016/028656) can be combined with CHA.7.538.1.2.H4(S241P) or CHA.7.518.1.H4(S241P). Specifically, an anti-TIGIT antibody comprising the VH of SEQ ID NO:125, VL of SEQ ID NO:133 and a human IgG1 constant region (from WO 2016/028656) can be combined with CHA.7.538.1.2.H4(S241P) or CHA.7.518.1.H4(S241P). Specifically, an anti-TIGIT antibody comprising the VH of SEQ ID NO:126, VL of SEQ ID NO:130 and a human IgG1 constant region (from WO 2016/028656) can be combined with CHA.7.538.1.2.H4(S241P) or CHA.7.518.1.H4(S241P). Specifically, an anti-TIGIT antibody comprising the VH of SEQ ID NO: 125, VL of SEQ ID NO:132 and a human IgG1 constant region (from WO 2016/028656) can be combined with CHA.7.538.1.2.H4(S241P) or CHA.7.518.1.H4(S241P). Specifically, an anti-TIGIT antibody comprising the VH of SEQ ID NO:143, VL of SEQ ID NO:145 and a human IgG1 constant region (from WO 2016/028656) can be combined with CHA.7.538.1.2.H4(S241P) or CHA.7.518.1.H4(S241P). Specifically, an anti-TIGIT antibody comprising the VH of SEQ ID NO:144, VL of SEQ ID NO:146 and a human IgG1 constant region (from WO 2016/028656) can be combined with CHA.7.538.1.2.H4(S241P) or CHA.7.518.1.H4(S241P). Specifically, an anti-TIGIT antibody comprising the VH of SEQ ID NO: 149, VL of SEQ ID NO:151 and a human IgG1 constant region (from WO 2016/028656) can be combined with CHA.7.538.1.2.H4(S241P) or CHA.7.518.1.H4(S241P). Specifically, an anti-TIGIT antibody comprising the VH of SEQ ID NO:150, VL of SEQ ID NO:152 and a human IgG1 constant region (from WO 2016/028656) can be combined with CHA.7.538.1.2.H4(S241P) or CHA.7.518.1.H4(S241P).

[0243] Additionally, in one embodiment, anti-TIGIT antibodies as outlined in WO 2017/030823 hereby incorporated by reference in its entirety and specifically for the SEQ ID NO:s listed below) can be combined with CHA.7.538.1.2.H4(S241P) or CHA.7.518.1.H4(S241P). Specifically, an anti-TIGIT antibody having a variable light chain sequence of SEQ ID NO:8 and a variable heavy chain sequence of SEQ ID NO:7 (from WO 2017/030823) can be combined with CHA.7.538.1.2.H4(S241P) or CHA.7.518.1.H4(S241P). Specifically, an anti-TIGIT antibody having a variable light chain sequence of SEQ ID NO:13 and a variable heavy chain sequence of SEQ ID NO:9 (from WO 2017/030823) can be combined with CHA.7.538.1.2.H4(S241P) or CHA.7.518.1.H4(S241P). Specifically, an anti-TIGIT antibody having a variable light chain sequence of SEQ ID NO:24 and a variable heavy chain sequence of SEQ ID NO:23 (from WO 2017/030823) can be combined with CHA.7.538.1.2.H4(S241P) or CHA.7.518.1.H4(S241P). Specifically, an anti-TIGIT antibody having a variable light chain sequence of SEQ ID NO:29 and a variable heavy chain sequence of SEQ ID NO:25 (from WO 2017/030823) can be combined with CHA.7.538.1.2.H4(S241P) or CHA.7.518.1.H4(S241P). In some embodiments, an anti-TIGIT antibody having a variable light chain selected from sequences of SEQ ID NO:s 14, 15, 16, 63, 64, 65, 66, 67, 68, 69, 70, 71, 72, 73, 74, 75, 76, 77, 78, 79, or 80 and a variable heavy chain sequence of SEQ ID NO:s 10, 11, 12, 48, 49, 50, 51, 52, 53, 54, 55, or 56 (from WO 2017/030823) can be combined with CHA.7.538.1.2.H4(S241P) or CHA.7.518.1.H4(S241P). In some embodiments, an anti-TIGIT antibody having a variable light chain selected from sequences of SEQ ID NO:s 14, 15, 16, 63, 64, 65, 66, 67, 68, 69, 70, 71, 72, 73, 74, 75, 76, 77, 78, 79, or 80 and a variable heavy chain sequence of SEQ ID NO:s 10, 11, 12, 48, 49, 50, 51, 52, 53, 54, 55, or 56 (from WO2017/030823) can be combined with CHA.7.538.1.2.H4(S241P) or CHA.7.518.1.H4(S241P). In some embodiments, an anti-TIGIT antibody having a variable light chain selected from sequences of SEQ ID NO:s 30, 31, or 32 and a variable heavy chain sequence of SEQ ID NO: 26, 27, 28, 89, 90, 91, 92, 93, 94, 95, 96, 97, 98, 99, 100, 101, 102, 103, 104, 105, 106, 107, 108, 109, 110, 111, or 112 (from WO2017/030823) can be combined with CHA.7.538.1.2.H4(S241P) or CHA.7.518.1.H4(S241P). In one embodiment, anti-TIGIT antibodies include the Merck antibody, MK-7684, currently in clinical trials (see, the World Wide Web at clinicaltrials.gov/ct2/show/NCT02964013?term=MK-7684&rank=1). In one embodiment, an MK-7684 anti-TIGIT antibody can be combined with CHA.7.538.1.2.H4(S241P) or CHA.7.518.1.H4(S241P).

[0244] Accordingly, in one embodiment, anti-TIGIT antibodies as outlined in US Patent Appl. No. 2016/0176963 (hereby incorporated by reference in its entirety and specifically for the SEQ ID NO:s listed below) can be combined with CHA.7.538.1.2.H4(S241P) or CHA.7.518.1.H4(S241P). Specifically, an anti-TIGIT antibody having a variable light chain sequence of SEQ ID NO:s 6, 9, 11, or 13 and a variable heavy chain sequence of SEQ ID NO:s 2, 3, 4, 5, 7, 8, 10, or 12 (from US2016/0176963) can be combined with CHA.7.538.1.2.H4(S241P) or CHA.7.518.1.H4(S241P). Specifically, an anti-TIGIT antibody having a variable light chain sequence of SEQ ID NO:s 6 and a variable heavy chain sequence of SEQ ID NO:s 2, 3, 4, or 5 (from US2016/0176963) can be combined with CHA.7.538.1.2.H4(S241P) or CHA.7.518.1.H4(S241P). Specifically, an anti-TIGIT antibody having a variable light chain sequence of SEQ ID NO:s 9 and a variable heavy chain sequence of SEQ ID NO:s 7 or 8 (from US2016/0176963) can be combined with CHA.7.538.1.2.H4(S241P) or CHA.7.518.1.H4(S241P). Specifically, an anti-TIGIT antibody having a variable light chain sequence of SEQ ID NO: 11 and a variable heavy chain sequence of SEQ ID NO: 10 (from US2016/0176963) can be combined with CHA.7.538.1.2.H4(S241P) or CHA.7.518.1.H4(S241P). Specifically, an anti-TIGIT antibody having a variable light chain sequence of SEQ ID NO: 13 and a variable heavy chain sequence of SEQ ID NO: 12 (from US2016/0176963) can be combined with CHA.7.538.1.2.H4(S241P) or CHA.7.518.1.H4(S241P). In one embodiment, anti-TIGIT antibodies include the BMS antibody, BMS-98620, currently in clinical trials (see, the World Wide Web at clinicaltrials.gov/ct2/show/NCT02913313?term=BMS-986207&rank=1). In one embodiment, an BMS-98620 anti-TIGIT antibody can be combined with CHA.7.538.1.2.H4(S241P) or CHA.7.518.1.H4(S241P).

[0245] In one embodiment, anti-TIGIT antibodies include the Arcus Bio antibody, AB154. In one embodiment, an AB154 anti-TIGIT antibody can be combined with CHA.7.538.1.2.H4(S241P) or CHA.7.518.1.H4(S241P).

[0246] Additionally, in one embodiment, anti-TIGIT antibodies as outlined in WO 2017/037707 (hereby incorporated by reference in its entirety and specifically for the SEQ ID NO:s listed below, and in particular for the sequences of the SEQ ID NO:s listed below, and in particular for the VSIG9 #1 antibody (SEQ ID NO:7 VH and SEQ ID NO: 8 VL) and the 258-csl #4 antibody (SEQ ID NO:18 VH and SEQ ID NO: 19 VL). Specifically, the anti-TIGIT antibody VSIG9 #1 antibody (from WO2017/037707; SEQ ID NO:7 VH and SEQ ID NO: 8 VL) can be combined with CHA.7.538.1.2.H4(S241P) or CHA.7.518.1.H4(S241P). Specifically, the anti-TIGIT antibody 258-csl #4 (from WO2017/037707; SEQ ID NO:18 VH and SEQ ID NO: 19 VL) can be combined with CHA.7.538.1.2.H4(S241P) or CHA.7.518.1.H4(S241P).

[0247] Additionally, in one embodiment, anti-TIGIT antibodies as outlined in WO 2017/059095 (hereby incorporated by reference in its entirety and specifically for the SEQ ID NO:s listed below, and in particular for the sequences disclosed therein. Specifically, the anti-TIGIT antibody comprising a V_{H} sequence of SEQ ID NO: 13 and a V_{L} sequence of SEQ ID NO: 26 (from WO 2017/059095) can be combined with CHA.7.538.1.2.H4(S241P) or CHA.7.518.1.H4(S241P). Specifically, the anti-TIGIT antibody comprising a V_{H} sequence of SEQ ID NO: 12 and a V_{L} sequence of SEQ ID NO: 26 (from WO 2017/059095) can be combined with CHA.7.538.1.2.H4(S241P) or CHA.7.518.1.H4(S241P). Specifically, the anti-TIGIT antibody comprising a V_{H} sequence of SEQ ID NO: 14 and a V_{L} sequence of SEQ ID NO: 26 (from WO 2017/059095) can be combined with CHA.7.538.1.2.H4(S241P) or CHA.7.518.1.H4(S241P). Specifically, the anti-TIGIT antibody comprising a V_{H} sequence of SEQ ID NO: 15 and a V_{L} sequence of SEQ ID NO: 26 (from WO 2017/059095) can be combined with CHA.7.538.1.2.H4(S241P) or CHA.7.518.1.H4(S241P). Specifically, the anti-TIGIT antibody comprising a V_{H} sequence of SEQ ID NO: 9 and a V_{L} sequence of SEQ ID NO: 26 (from WO 2017/059095) can be combined with CHA.7.538.1.2.H4(S241P) or CHA.7.518.1.H4(S241P). Specifically, the anti-TIGIT antibody comprising a V_{H} sequence of SEQ ID NO: 10 and a V_{L} sequence of SEQ ID NO: 26 (from WO 2017/059095) can be combined with CHA.7.538.1.2.H4(S241P) or CHA.7.518.1.H4(S241P). Specifically, the anti-TIGIT antibody comprising a V_{H} sequence of SEQ ID NO: 14 and a V_{L} sequence of SEQ ID NO: 26 (from WO 2017/059095) can be combined with CHA.7.538.1.2.H4(S241P) or CHA.7.518.1.H4(S241P). Specifically, the anti-TIGIT antibody comprising a heavy chain of SEQ ID NO: 99 and a light chain of SEQ ID NO: 92; or (it) a heavy chain of SEQ ID NO: 100 and a light chain of SEQ ID NO: 92 (from WO 2017/059095) can be combined with CHA.7.538.1.2.H4(S241P) or CHA.7.518.1.H4(S241P). Specifically, the anti-TIGIT antibody comprising a heavy chain of SEQ ID NO: 97 and a light chain of SEQ ID NO: 92; or (ii) a heavy chain of SEQ ID NO: 98 and a light chain of SEQ ID NO: 92 (from WO 2017/059095) can be combined with CHA.7.538.1.2.H4(S241P) or CHA.7.518.1.H4(S241P). Specifically, the anti-TIGIT antibody comprising a heavy chain of SEQ ID NO: 101 and a light chain of SEQ ID NO: 92; or (ii) a heavy chain of SEQ ID NO: 102 and a light chain of SEQ ID NO: 92 (from WO 2017/059095) can be combined with CHA.7.538.1.2.H4(S241P) or CHA.7.518.1.H4(S241P). Specifically, the anti-TIGIT antibody comprising a heavy chain of SEQ ID NO: 103 and a light chain of SEQ ID NO: 92; or (ii) a heavy chain of SEQ ID NO: 104 and a light chain of SEQ ID NO: 92 (from WO 2017/059095) can be combined with CHA.7.538.1.2.H4(S241P) or CHA.7.518.1.H4(S241P). Specifically, the anti-TIGIT antibody comprising a heavy chain of SEQ ID NO: 90 and a light chain of SEQ ID NO: 92; or (ii) a heavy chain of SEQ ID NO: 91 and a light chain of SEQ ID NO: 92 (from WO 2017/059095) can be combined with CHA.7.538.1.2.H4(S241P) or CHA.7.518.1.H4(S241P). Specifically, the anti-TIGIT antibody comprising a heavy chain of SEQ ID NO: 93 and a light chain of SEQ ID NO: 92; or (ii) a heavy chain of SEQ ID NO: 94 and a light chain of SEQ ID NO: 92 (from WO 2017/059095) can be combined with CHA.7.538.1.2.H4(S241P) or CHA.7.518.1.H4(S241P). Specifically, the anti-TIGIT antibody comprising a heavy chain of SEQ ID NO: 95 and a light chain of SEQ ID NO: 92; or (ii) a heavy chain of SEQ ID NO: 96 and a light chain of SEQ ID NO: 92 (from WO 2017/059095) can be combined with CHA.7.538.1.2.H4(S241P) or CHA.7.518.1.H4(S241P). Additionally, in one embodiment, anti-TIGIT antibodies as outlined in WO 2016/106302 (hereby incorporated by reference in its entirety and specifically for the SEQ ID NO:s listed below, and in particular for the sequences of the particular sequences disclosed therein. Specifically, the anti-TIGIT antibody comprising a heavy chain sequence selected from SEQ ID NOs: 2, 3, 4, 5, 7, 8, 10 or 12 (from WO 2016/106302) and a light chain sequence from SEQ ID NOs: 6, 9, 11, or 13 (from WO 2016/106302) can be combined with CHA.7.538.1.2.H4(S241P) or CHA.7.518.1.H4(S241P). Specifically, the anti-TIGIT antibody 22G2 (from WO 2016/106302) can be combined with CHA.7.538.1.2.H4(S241P) or CHA.7.518.1.H4(S241P). Specifically, the anti-TIGIT antibody 11G11 (from WO 2016/106302) can be combined with CHA.7.538.1.2.H4(S241P) or CHA.7.518.1.H4(S241P). Specifically, the anti-TIGIT antibody 15A6 (from WO 2016/106302) can be combined with CHA.7.538.1.2.H4(S241P) or CHA.7.518.1.H4(S241P).

[0248] Additionally, in one embodiment, anti-TIGIT antibodies as outlined in U.S. Patent Publication No. 2017281764 (hereby incorporated by reference in its entirety and specifically for the SEQ ID NO:s listed below, and in particular for the sequences disclosed therein. Specifically, the anti-TIGIT antibody comprising a V_{H} sequence of SEQ ID NO: 10 and a V_{L} sequence of SEQ ID NO: 14 (from US 2017281764) can be combined with CHA.7.538.1.2.H4(S241P) or CHA.7.518.1.H4(S241P). Specifically, the anti-TIGIT antibody comprising a V_{H} sequence of SEQ ID NO: 18 and a V_{L} sequence of SEQ ID NO: 22 (from US 2017281764) can be combined with CHA.7.538.1.2.H4(S241P) or CHA.7.518.1.H4(S241P). Specifically, the anti-TIGIT antibody comprising a V_{H} sequence of SEQ ID NO: 26 and a V_{L} sequence of SEQ ID NO: 30 (from US 2017281764) can be combined with CHA.7.538.1.2.H4(S241P) or CHA.7.518.1.H4(S241P). Specifically, the anti-TIGIT antibody comprising a V_{H} sequence of SEQ ID NO: 35 and a V_{L} sequence of SEQ ID NO: 37 (from US 2017281764) can be combined with CHA.7.538.1.2.H4(S241P) or CHA.7.518.1.H4(S241P). Specifically, the anti-TIGIT antibody comprising a V_{H} sequence of SEQ ID NO: 34 and a V_{L} sequence of SEQ ID NO: 36 (from US 2017281764) can be combined with CHA.7.538.1.2.H4(S241P) or CHA.7.518.1.H4(S241P).

[0249] In another embodiment, anti-TIGIT antibodies as outlined in International Patent Publication No. WO 2015/009856 (hereby incorporated by reference in its entirety and specifically for the SEQ ID NO:s listed below, and in particular for the sequences disclosed therein (see, also International Patent Publication No. WO 2016/011264). Specifically, the anti-TIGIT antibody comprising a V_{H} sequence of SEQ ID NO: 15 and a V_{L} sequence of SEQ ID NO: 13 (from WO 2015/009856) can be combined with CHA.7.538.1.2.H4(S241P) or CHA.7.518.1.H4(S241P). Specifically, the anti-TIGIT antibody comprising a V_{H} sequence of SEQ ID NO: 16 and a V_{L} sequence of SEQ ID NO: 14 (from WO 2015/009856) can be combined with CHA.7.538.1.2.H4(S241P) or CHA.7.518.1.H4(S241P).

[0250] In some embodiments, the anti-TIGIT antibody is an antibody described in any of U.S. Patent Application No. 20170037133, International Patent Publication No. WO 2017/048824, a MBSA43 (commercially available from eBioscience), is anti-TIGIT antibody pab2197 or pab2196 (U.S. Patent Application No. 2017/0081409), EOS084448, CASC-674 (available from Adimab LLC). Specifically, an anti-TIGIT antibody as described in U.S. Patent Application No. 2017/0037133 can be combined with CHA.7.538.1.2.H4(S241P) or CHA.7.518.1.H4(S241P). Specifically, an anti-TIGIT antibody as described in International Patent Publication No. WO 2017/048824 can be combined with CHA.7.538.1.2.H4(S241P) or CHA.7.518.1.H4(S241P). Specifically, the anti-TIGIT antibody MBSA43 can be combined with CHA.7.538.1.2.H4(S241P) or CHA.7.518.1.H4(S241P). Specifically, the anti-TIGIT antibody pab2197 can be combined with CHA.7.538.1.2.H4(S241P) or CHA.7.518.1.H4(S241P). Specifically, the anti-TIGIT antibody pab2196 can be combined with CHA.7.538.1.2.H4(S241P) or CHA.7.518.1.H4(S241P). Specifically, the anti-TIGIT antibody EOS084448 can be combined with CHA.7.538.1.2.H4(S241P) or CHA.7.518.1.H4(S241P). Specifically, the anti-TIGIT antibody CASC-674 can be combined with CHA.7.538.1.2.H4(S241P) or CHA.7.518.1.H4(S241P).

[0251] In some embodiments, the anti-TIGIT antibody is an antibody described in U.S. Pat. No. 9,713,364 (incorporated herein by reference in its entirety). In some embodiments, the anti-TIGIT antibody is PTZ-201 (ASP8374). Specifically, the anti-TIGIT antibody PTZ-201 (ASP8374) can be combined with CHA.7.538.1.2.H4(S241P) or CHA.7.518.1.H4(S241P). In some embodiments, the anti-TIGIT antibody is an antibody selected from the group consisting of MAB1, MAB2, MAB3, MAB4, MAB5, MAB6, MAB7, MAB8, MAB9, MAB10, MAB11, MAB12, MAB13, MAB14, MAB15, MAB16, MAB17, MAB18, 40 MAB19, MAB20, or MAB21, as described in U.S. Pat. No. 9,713,364 Specifically, the anti-TIGIT antibody MAB1 from U.S. Pat. No. 9,713,364 can be combined with CHA.7.538.1.2.H4(S241P) or CHA.7.518.1.H4(S241P). Specifically, the anti-TIGIT antibody MAB2 from U.S. Pat. No. 9,713,364 can be combined with CHA.7.538.1.2.H4(S241P) or CHA.7.518.1.H4(S241P). Specifically, the anti-TIGIT antibody MAB3 from U.S. Pat. No. 9,713,364 can be combined with CHA.7.538.1.2.H4(S241P) or CHA.7.518.1.H4(S241P). Specifically, the anti-TIGIT antibody MAB4 from U.S. Pat. No. 9,713,364 can be combined with CHA.7.538.1.2.H4(S241P) or CHA.7.518.1.H4(S241P). Specifically, the anti-TIGIT antibody MAB5 from U.S. Pat. No. 9,713,364 can be combined with CHA.7.538.1.2.H4(S241P) or CHA.7.518.1.H4(S241P). Specifically, the anti-TIGIT antibody MAB6 from U.S. Pat. No. 9,713,364 can be combined with CHA.7.538.1.2.H4(S241P) or CHA.7.518.1.H4(S241P). Specifically, the anti-TIGIT antibody MAB7 from U.S. Pat. No. 9,713,364 can be combined with CHA.7.538.1.2.H4(S241P) or CHA.7.518.1.H4(S241P). Specifically, the anti-TIGIT antibody MAB8 from U.S. Pat. No. 9,713,364 can be combined with CHA.7.538.1.2.H4(S241P) or CHA.7.518.1.H4(S241P). Specifically, the anti-TIGIT antibody MAB9 from U.S. Pat. No. 9,713,364 can be combined with CHA.7.538.1.2.H4(S241P) or CHA.7.518.1.H4(S241P). Specifically, the anti-TIGIT antibody MAB10 from U.S. Pat. No. 9,713,364 can be combined with CHA.7.538.1.2.H4(S241P) or CHA.7.518.1.H4(S241P). Specifically, the anti-TIGIT antibody MA 11 from U.S. Pat. No. 9,713,361 can be combined with CHA.7.538.1.2.H4(S241P) or CHA.7.518.1.H4(S241P). Specifically, the anti-TIGIT antibody MAB12 from U.S. Pat. No. 9,713,364 can be combined with CHA.7.538.1.2.H4(S241P) or CHA.7.518.1.H4(S241P). Specifically, the anti-TIGIT antibody MAB13 from U.S. Pat. No. 9,713,364 can be combined with CHA.7.538.1.2.H4(S241P) or CHA.7.518.1.H4(S241P). Specifically, the anti-TIGIT antibody MAB14 from U.S. Pat. No. 9,713,364 can be combined with CHA.7.538.1.2.H4(S241P) or CHA.7.518.1.H4(S241P). Specifically, the anti-TIGIT antibody MAB15 from U.S. Pat. No. 9,713,364 can be combined with CHA.7.538.1.2.H4(S241P) or CHA.7.518.1.H4(S241P). Specifically, the anti-TIGIT antibody MAB16 from U.S. Pat. No. 9,713,364 can be combined with CHA.7.538.1.2.H4(S241P) or CHA.7.518.1.H4(S241P). Specifically, the anti-TIGIT antibody MAB17 from U.S. Pat. No. 9,713,364 can be combined with CHA.7.538.1.2.H4(S241P) or CHA.7.518.1.H4(S241P). Specifically, the anti-TIGIT antibody MAB18 from U.S. Pat. No. 9,713,364 can be combined with CHA.7.538.1.2.H4(S241P) or CHA.7.518.1.H4(S241P). Specifically, the anti-TIGIT antibody MAB19 from U.S. Pat. No. 9,713,364 can be combined with CHA.7.538.1.2.H4(S241P) or CHA.7.518.1.H4(S241P). Specifically, the anti-TIGIT antibody MAB20 from U.S. Pat. No. 9,713,364 can be combined with CHA.7.538.1.2.H4(S241P) or CHA.7.518.1.H4(S241P). Specifically, the anti-TIGIT antibody MAB21 from U.S. Pat. No. 9,713,364 can be combined with CHA.7.538.1.2.H4(S241P) or CHA.7.518.1.H4(S241P).

[0252] In some embodiments, the anti-TIGIT antibody is 10A7, 1F4, 14A6, 28H5, 31C6, 15A6, 22G2, 11G11, and/or 10D7, the contents of each of which are incorporated herein by reference in their entirety. Specifically, the anti-TIGIT antibody 10A7 can be combined with CHA.7.538.1.2.H4(S241P) or CHA.7.518.1.H4(S241P). Specifically, the anti-TIGIT antibody 1F4 can be combined with CHA.7.538.1.2.H4(S241P) or CHA.7.518.1.H4(S241P). Specifically, the anti-TIGIT antibody 14A6 can be combined with CHA.7.538.1.2.H4(S241P) or CHA.7.518.1.H4(S241P). Specifically, the anti-TIGIT antibody 28H5 can be combined with CHA.7.538.1.2.H4(S241P) or CHA.7.518.1.H4(S241P). Specifically, the anti-TIGIT antibody 31C6 can be combined with CHA.7.538.1.2.H4(S241P) or CHA.7.518.1.H4(S241P). Specifically, the anti-TIGIT antibody 15A6 can be combined with CHA.7.538.1.2.H4(S241P) or CHA.7.518.1.H4(S241P). Specifically, the anti-TIGIT antibody 22G2 can be combined with CHA.7.538.1.2.H4(S241P) or CHA.7.518.1.H4(S241P). Specifically, the anti-TIGIT antibody 11G11 can be combined with CHA.7.538.1.2.H4(S241P) or CHA.7.518.1.H4(S241P). Specifically, the anti-TIGIT antibody 10D7 can be combined with CHA.7.538.1.2.H4(S241P) or CHA.7.518.1.H4(S241P).

[0253] In some embodiments, the anti-TIGIT antibody is one of those described in International Patent Publication WO 2016/028656, incorporated herein in its entirety. Specifically, the anti-TIGIT antibodies are provided in International Patent Publication No. WO 2016/028656 (and reproduced herein in FIG. 3) can be combined with CHA.7.538.1.2.H4(S241P) or CHA.7.518.1.H4(S241P).

[0254] The anti-TIGIT antibodies described herein can find use according to the triple combination therapy methods of the invention are labeled as follows. Such TIGIT antibodies have reference numbers, for example “CPA.9.086”. This represents the combination of the variable heavy and variable light chains, as depicted in FIG. 3, for example, with the understanding that these antibodies include two heavy chains and two light chains. “CPA.9.086.VH” refers to the variable heavy portion of CPA. 9. 086, while “CPA. 9. 086.VL” is the variable light chain. “CPA. 9. 086.vhCDR1”, “CPA. 9. 086.vhCDR2”, “CPA. 9. 086.vhCDR3”, “CPA. 9. 086.vlCDR1”, “CPA. 9. 086.vlCDR2”, and “CPA. 9. 086.vlCDR3”, refers to the CDRs are indicated. “CPA. 9. 086.HC” refers to the entire heavy chain (e.g. variable and constant domain) of this molecule, and “CPA. 9. 086.LC” refers to the entire light chain (e.g. variable and constant domain) of the same molecule. In general, the human kappa light chain is used for the constant domain of each phage (or humanized hybridoma) antibody herein, although in some embodiments the lambda light constant domain is used. “CPA. 9. 086.H1” refers to a full length antibody comprising the variable heavy and light domains, including the constant domain of Human IgG1 (hence, the H1; IgG1, IgG2, IgG3 and IgG4 sequences are shown in FIGS. 1, for example). Accordingly, “CPA. 9. 086.H2” would be the CPA. 9. 086 variable domains linked to a Human IgG2. “CPA. 9. 086.H3” would be the CPA. 9. 086 variable domains linked to a Human IgG3, and “CPA. 9. 086.H4” would be the CPA. 9. 086 variable domains linked to a Human IgG4. Note that in some cases, the human IgGs may have additional mutations, such are described below, and this can be annotated. For example, in many embodiments, there may be a S241P mutation in the human IgG4, and this can be annotated as “CPA.9.086.H4(S241P)” for example. The human IgG4 sequence with this S241P hinge variant is shown in FIG. 1. Other potential variants are IgG1(N297A), (or other variants that ablate glycosylation at this site and thus many of the effector functions associated with FcγRIIIa binding), and IgG1(D265A), which reduces binding to FcγR receptors. The anti-TIGIT antibodies for use in the present invention can comprise any of the TIGIT antibody domain sequences. The anti-TIGIT antibodies for use in the present invention can comprise any of the TIGIT antigen binding domains.

[0255] The invention further provides variable heavy and light domains as well as full length heavy and light chains.

[0256] In some embodiments, the invention provides scFvs that bind to TIGIT comprising a variable heavy domain and a variable light domain linked by an scFv linker as outlined above. The VL and VH domains can be in either orientation, e.g. from N- to C-terminus “VH-linker-VL” or “VL-linker” VH”. These are named by their component parts; for example, “scFv-CPA. 9.086.VH-linker-VL” or “scFv-CPA.9.086.VL-linker-VH.” Thus, “scFv-CPA.9.086” can be in either orientation. The anti-TIGIT antibodies for use in the present invention can comprise any scFvs that bind to TIGIT. The anti-TIGIT antibodies for use in the present invention can comprise any scFvs that bind to TIGIT. The anti-TIGIT antibodies for use in the present invention can include any of the following:
[0257] CPA.9.018, CPA.9.018.VH, CPA.9.018.VL, CPA.9.018.HC, CPA.9.018.LC, CPA.9.018.H1, CPA.9.018.H2, CPA.9.018.H3, CPA.9.018.H4; CPA.9.018.H4(S241P); CPA.9.018.vhCDR1, CPA.9.018.vhCDR2, CPA.9.018.vhCDR3, CPA.9.018.vlCDR1, CPA.9.018.vlCDR2, CPA.9.018.vlCDR3 and scFv-CPA.9.018;
[0258] CPA.9.027, CPA.9.027.VH, CPA.9.027.VL, CPA.9.027.HC, CPA.9.027.LC, CPA.9.027.H1, CPA.9.027.H2, CPA.9.027.H3, CPA.9.027.H4; CPA.9.018.H4(S241P); CPA.9.027.vhCDR1, CPA.9.027.vhCDR2, CPA.9.027.vhCDR3, CPA.9.027.vlCDR1, CPA.9.027.vlCDR2, CPA.9.027.vlCDR3 and scFv-CPA.9.027;
[0259] CPA.9.049, CPA.9.049.VH, CPA.9.049.VL, CPA.9.049.HC, CPA.9.049.LC, CPA.9.049.H1, CPA.9.049.H2, CPA.9.049.H3; CPA.9.049.H4; CPA.9.049.H4(S241P); CPA.9.049.vhCDR1, CPA.9.049.vhCDR2, CPA.9.049.vhCDR3, CPA.9.049.vlCDR1, CPA.9.049.vlCDR2, CPA.9.049.vlCDR3 and scFv-CPA.9.049;
[0260] CPA.9.057, CPA.9.057.VH, CPA.9.057.VL, CPA.9.057.HC, CPA.9.057.LC, CPA.9.057.H1, CPA.9.057.H2, CPA.9.057.H3; CPA.9.057.H4; CPA.9.057.H4(S241P); CPA.9.057.vhCDR1, CPA.9.057.vhCDR2, CPA.9.057.vhCDR3, CPA.9.057.vlCDR1, CPA.9.057.vlCDR2, CPA.9.057.vlCDR3 and scFv-CPA.9.057;
[0261] CPA.9.059, CPA.9.059.VH, CPA.9.059.VL, CPA.9.059.HC, CPA.9.059.LC, CPA.9.059.H1, CPA.9.059.H2, CPA.9.059.H3; CPA.9.059.H4; CPA.9.059.H4(S241P); CPA.9.059.vhCDR1, CPA.9.059.vhCDR2, CPA.9.059.vhCDR3, CPA.9.059.vlCDR1, CPA.9.059.v1CDR2, CPA.9.059.v1CDR3 and scFv-CPA.9.059;
[0262] CPA.9.083, CPA.9.083.VH, CPA.9.083.VL, CPA.9.083.HC, CPA.9.083.LC, CPA.9.083.H1, CPA.9.083.H2, CPA.9.083.H3; CPA.9.083.H4; CPA.9.083.H4(S241P); CPA.9.083.vhCDR1, CPA.9.083.vhCDR2, CPA.9.083.vhCDR3, CPA.9.083.vlCDR1, CPA.9.083.vlCDR2, CPA.9.083.vlCDR3 and scFv-CPA.9.083;
[0263] CPA.9.086, CPA.9.086.VH, CPA.9.086.VL, CPA.9.086.HC, CPA.9.086.LC, CPA.9.086.H1, CPA.9.086.H2, CPA.9.086.H3; CPA.9.086.H4; CPA.9.086.H4(S241P); CPA.9.086.vhCDR1, CPA.9.086.vhCDR2, CPA.9.086.vhCDR3, CPA.9.086.vlCDR1, CPA.9.086.vlCDR2, CPA.9.086.vlCDR3 and scFv-CPA.9.086;
[0264] CPA.9.089, CPA.9.089.VH, CPA.9.089.VL, CPA.9.089.HC, CPA.9.089.LC, CPA.9.089.H1, CPA.9.089.H2, CPA.9.089.H3; CPA.9.089.H4; CPA.9.089.H4(S241P); CPA.9.089.vhCDR1, CPA.9.089.vhCDR2, CPA.9.089.vhCDR3, CPA.9.089.vlCDR1, CPA.9.089.vlCDR2, CPA.9.089.vlCDR3 and scFv-CPA.9.089;
[0265] CPA.9.093, CPA.9.093.VH, CPA.9.093.VL, CPA.9.093.HC, CPA.9.093.LC, CPA.9.093.H1, CPA.9.093.H2, CPA.9.093.H3; CPA.9.093.H4; CPA.9.093.H4(S241P); CPA.9.093.vhCDR1, CPA.9.093.vhCDR2, CPA.9.093.vhCDR3, CPA.9.093.vlCDR1, CPA.9.093.v1CDR2, CPA.9.093.v1CDR3 and scFv-CPA.9.093;
[0266] CPA.9.101, CPA.9.101.VH, CPA.9.101.VL, CPA.9.101.HC, CPA.9.101.LC, CPA.9.101.H1, CPA.9.101.H2, CPA.9.101.H3; CPA.9.101.H4; CPA.9.101.H4(S241P); CPA.9.101.vhCDR1, CPA.9.101.vhCDR2, CPA.9.101.vhCDR3, CPA.9.101.vlCDR1, CPA.9.101.v1CDR2, CPA.9.101.v1CDR3 and scFv-CPA.9.101; and
[0267] CPA.9.103, CPA.9.103.VH, CPA.9.103.VL, CPA.9.103.HC, CPA.9.103.LC, CPA.9.103.H1, CPA.9.103.H2, CPA.9.103.H3; CPA.9.103.H4; CPA.9.103.H4(S241P); CPA.9.103.vhCDR1, CPA.9.103.vhCDR2, CPA.9.103.vhCDR3, CPA.9.103.vlCDR1, CPA.9.103.v1CDR2, CPA.9.103.vlCDR3 and scFv-CPA.9.103.

[0268] Furthermore, the present invention provides a number of CHA antibodies, which are murine antibodies generated from hybridomas. As is well known the art, the six CDRs are useful when put into either human framework variable heavy and variable light regions or when the variable heavy and light domains are humanized. Accordingly, the present invention provides antibodies, usually full length or scFv domains, that comprise the following sets of CDRs, the sequences of which are shown in FIG. 3 and/or the sequence listing:
[0269] CHA.9.536.1, CHA.9.536.1.VH, CHA.9.536.1.VL, CHA.9.536.1.HC, CHA.9.536.1 LC, CHA.9.536.1.H1, CHA.9.536.1.H2, CHA.9.536.1.H3; CHA.9.536.1.H4, CHA.9.536.1.H4(S241P), CHA.9.536.1.vhCDR1, CHA.9.536.1.vhCDR2, CHA.9.536.1.vhCDR3, CHA.9.536.1.vlCDR1, CHA.9.536.1.vlCDR2 and CHA.9.536.1.vhCDR3;
[0270] CHA.9.536.3, CHA.9.536.3.VH, CHA.9.536.3.VL, CHA.9.536.3.HC, CHA.9.536.3.LC, CHA.9.536.3.H1, CHA.9.536.3.H2, CHA.9.536.3.H3; CHA.9.536.3.H4, CHA.9.536.3.H4(S241P); CHA.9.536.3.vhCDR1, CHA.9.536.3.vhCDR2, CHA.9.536.3.vhCDR3, CHA.9.536.3.vlCDR1, CHA.9.536.3.vlCDR2 and CHA.9.536.3.vhCDR3;
[0271] CHA.9.536.4, CHA.9.536.4.VH, CHA.9.536.4.VL, CHA.9.536.4.HC, CHA.9.536.4.LC, CHA.9.536.4.H1, CHA.9.536.4.H2, CHA.9.536.4.H3; CHA.9.536.4.H4, CHA.9.536.4.H4(S241P), CHA.9.536.4.vhCDR1, CHA.9.536.4.vhCDR2, CHA.9.536.4.vhCDR3, CHA.9.536.4.vlCDR1, CHA.9.536.4.vlCDR2 and CHA.9.536.4.vhCDR3;
[0272] CHA.9.536.5, CHA.9.536.5.VH, CHA.9.536.5.VL, CHA.9.536.5.HC, CHA.9.536.5.LC, CHA.9.536.5.H1, CHA.9.536.5.H2, CHA.9.536.5.H3; CHA.9.536.5.H4, CHA.9.536.5.H4(S241P), CHA.9.536.5.vhCDR1, CHA.9.536.5.vhCDR2, CHA.9.536.5.vhCDR3, CHA.9.536.5.vlCDR1, CHA.9.536.5.vlCDR2 and CHA.9.536.5.vhCDR3;
[0273] CHA.9.536.6, CHA.9.536.6.VH, CHA.9.536.6.VL, CHA.9.536.6.HC, CHA.9.536.6.LC, CHA.9.536.6.H1, CHA.9.536.6.H2, CHA.9.536.6.H3; CHA.9.536.6.H4, CHA.9.536.6.vhCDR1, CHA.9.536.6.vhCDR2, CHA.9.536.6.vhCDR3, CHA.9.536.6.vlCDR1, CHA.9.536.6.vlCDR2 and CHA.9.536.6.vhCDR3;
[0274] CHA.9.536.7, CHA.9.536.7.VH, CHA.9.536.7.VL, CHA.9.536.7.HC, CHA.9.536.7.LC, CHA.9.536.7.H1, CHA.9.536.7.H2, CHA.9.536.7.H3; CHA.9.536.7.H4, CHA.9.536.5.H4(S241P); CHA.9.536.7.vhCDR1, CHA.9.536.7.vhCDR2, CHA.9.536.7.vhCDR3, CHA.9.536.7.vlCDR1, CHA.9.536.7.vlCDR2 and CHA.9.536.7.vhCDR3;
[0275] CHA.9.536.8, CHA.9.536.8.VH, CHA.9.536.8.VL, CHA.9.536.8.HC, CHA.9.536.8.LC, CHA.9.536.8.H1, CHA.9.536.8.H2, CHA.9.536.8.H3; CHA.9.536.8.H4, CHA.9.536.8.H4(S241P), CHA.9.536.8.vhCDR1, CHA.9.536.8.vhCDR2, CHA.9.536.8.vhCDR3, CHA.9.536.8.vlCDR1, CHA.9.536.8.v1CDR2 and CHA.9.536.8.vhCDR3;
[0276] CHA.9.560.1, CHA. 9.560.1VH, CHA. 9.560.1VL, CHA. 9.560.1.HC, CHA. 9.560.1.LC, CHA. 9.560.1.H1, CHA. 9.560.1.H2, CHA. 9.560.1.H3; CHA. 9.560.1.H4, CHA. 9.560.1.H4(S241P), CHA. 9.560.1.vhCDR1, CHA. 9.560.1.vhCDR2, CHA. 9.560.1.vhCDR3, CHA. 9.560.1.vlCDR1, CHA. 9.560.1.v1CDR2 and CHA. 9.560.1.vhCDR3;
[0277] CHA.9.560.3, CHA. 9.560. 3VH, CHA. 9.560. 3.VL, CHA. 9.560. 3.HC, CHA. 9.560. 3.LC, CHA. 9.560. 3.H1, CHA. 9.560. 3.H2, CHA. 9.560. 3.H3; CHA.9.560.3.H4, CHA.9.560.3.H4(S241P); CHA. 9.560. 3.vhCDR1, CHA. 9.560. 3.vhCDR2, CHA. 9.560. 3.vhCDR3, CHA. 9.560. 3.vlCDR1, CHA. 9.560. 3.vlCDR2 and CHA. 9.560. 3.vhCDR3;
[0278] CHA.9.560.4, CHA. 9.560. 4VH, CHA. 9.560. 4.VL, CHA. 9.560. 4.HC, CHA. 9.560. 4.LC, CHA. 9.560. 4.H1, CHA. 9.560. 4.H2, CHA. 9.560. 4.H3; CHA.9.560.4.H4, CHA.9.560.4.H4(S241P), CHA. 9.560. 4.vhCDR1, CHA. 9.560. 4.vhCDR2, CHA. 9.560. 4.vhCDR3, CHA. 9.560. 4.vlCDR1, CHA. 9.560. 4.vlCDR2 and CHA. 9.560. 4.vhCDR3;
[0279] CHA.9.560.5, CHA. 9.560. 5VH, CHA. 9.560. 5.VL, CHA. 9.560. 5.HC, CHA. 9.560. 5.LC, CHA. 9.560. 5.H1, CHA. 9.560. 5.H2, CHA. 9.560. 5.H3; CHA. 9.560. 5.H4, CHA. 9.560. 5.vhCDR1, CHA. 9.560. 5.vhCDR2, CHA. 9.560. 5.vhCDR3, CHA. 9.560. 5.vlCDR1, CHA. 9.560. 5.vlCDR2 and CHA. 9.560. 5.vhCDR3;
[0280] CHA.9.560.6, CHA. 9.560. 6VH, CHA. 9.560. 6.VL, CHA. 9.560. 6.HC, CHA. 9.560. 6.LC, CHA. 9.560. 6.H1, CHA. 9.560. 6.H2, CHA. 9.560. 6.H3; CHA.9.560.6.H4, CHA.9.560.6.H4(S241P), CHA. 9.560. 6.vhCDR1, CHA. 9.560. 6.vhCDR2, CHA. 9.560. 6.vhCDR3, CHA. 9.560. 6.vlCDR1, CHA. 9.560. 6.vlCDR2 and CHA. 9.560. 6.vhCDR3;
[0281] CHA.9.560.7, CHA. 9.560. 7VH, CHA. 9.560. 7.VL, CHA. 9.560. 7.HC, CHA. 9.560. 7.LC, CHA. 9.560. 7.H1, CHA. 9.560. 7.H2, CHA. 9.560. 7.H3; CHA.9.560.7.H4; CHA.9.560.7.H4(S241P); CHA. 9.560. 7.vhCDR1, CHA. 9.560. 7.vhCDR2, CHA. 9.560. 7.vhCDR3, CHA. 9.560. 7.vlCDR1, CHA. 9.560. 7.vlCDR2 and CHA. 9.560. 7.vhCDR3;
[0282] CHA.9.560.8, CHA. 9.560. 8VH, CHA. 9.560. 8.VL, CHA. 9.560. 8.HC, CHA. 9.560. 8.LC, CHA. 9.560. 8.H1, CHA. 9.560. 8.H2, CHA. 9.560. 8.H3; CHA.9.560.8.H4, CHA.9.560.8.H4(S241P); CHA. 9.560. 8.vhCDR1, CHA. 9.560. 8.vhCDR2, CHA. 9.560. 8.vhCDR3, CHA. 9.560. 8.vlCDR1, CHA. 9.560. 8.vlCDR2 and CHA. 9.560. 8.vhCDR3;
[0283] CHA.9.546.1, CHA. 9. 546.1VH, CHA. 9. 546.1 VL, CHA. 9. 546.1.HC, CHA. 9. 546.1.LC, CHA. 9. 546.1.H1, CHA. 9. 546.1.H2, CHA. 9. 546.1.H3; CHA.9.546.1.H4, CHA.9.546.1.H4(S241P), CHA. 9. 546.1.vhCDR1, CHA. 9. 546.1.vhCDR2, CHA. 9. 546.1.vhCDR3, CHA. 9. 546.1.vlCDR1, CHA. 9. 546.1.v1CDR2 and CHA. 9. 546.1.vhCDR3;
[0284] CHA.9.547.1, CHA. 9. 547.1VH, CHA. 9. 547.1.VL, CHA. 9. 547.1.HC, CHA. 9. 547.1 LC, CHA. 9. 547.1.H1, CHA. 9. 547.1.H2, CHA. 9. 547.1.H3; CHA.9.547.1.H4, CHA.9.547.1.H4(S241P), CHA. 9. 547.1.vhCDR1, CHA. 9. 547.1.vhCDR2, CHA. 9. 547.1.vhCDR3, CHA. 9. 547.1.vlCDR1, CHA. 9. 547.1.v1CDR2 and CHA. 9. 547.1.vhCDR3;
[0285] CHA.9.547.2, CHA. 9. 547. 2VH, CHA. 9. 547. 2.VL, CHA. 9. 547. 2.HC, CHA. 9. 547. 2.LC, CHA. 9. 547. 2.H1, CHA. 9. 547. 2.H2, CHA. 9. 547. 2.H3; CHA.9.547.2.H4, CHA.9.547.2.H4(S241P), CHA. 9. 547. 2.vhCDR1, CHA. 9. 547. 2.vhCDR2, CHA. 9. 547. 2.vhCDR3, CHA. 9. 547. 2.vlCDR1, CHA. 9. 547. 2.vlCDR2 and CHA. 9. 547. 2.vhCDR3;
[0286] CHA.9.547.3, CHA. 9. 547. 3VH, CHA. 9. 547. 3.VL, CHA. 9. 547. 3.HC, CHA. 9. 547. 3.LC, CHA. 9. 547. 3.H1, CHA. 9. 547. 3.H2, CHA. 9. 547. 3.H3; CHA.9.547.3.H4, CHA.9.547.3.H4(S241P), CHA. 9. 547. 3.vhCDR1, CHA. 9.547. 3.vhCDR2, CHA. 9. 547. 3.vhCDR3, CHA. 9. 547. 3.vlCDR1, CHA. 9. 547. 3.vlCDR2 and CHA. 9. 547. 3.vhCDR3;
[0287] CHA.9.547.4, CHA. 9. 547. 4VH, CHA. 9. 547. 4.VL, CHA. 9. 547. 4.HC, CHA. 9.547. 4.LC, CHA. 9. 547. 4.H1, CHA. 9. 547. 4.H2, CHA. 9. 547. 4.H3; CHA.9.547.4.H4, CHA.9.547.4.H4(S241P), CHA. 9. 547. 4.vhCDR1, CHA. 9. 547. 4.vhCDR2, CHA. 9. 547. 4.vhCDR3, CHA. 9. 547. 4.vlCDR1, CHA. 9. 547. 4.vlCDR2 and CHA. 9. 547. 4.vhCDR3;
[0288] CHA.9.547.6, CHA. 9. 547. 6 VH, CHA. 9. 547. 6.VL, CHA. 9. 547. 6.HC, CHA. 9. 547. 6.LC, CHA. 9. 547. 6.H1, CHA. 9. 547. 6.H2, CHA. 9. 547. 6.H3; CHA.9.547.6.H4, CHA.9.547.6.H4(S241P), CHA. 9. 547. 6.vhCDR1, CHA. 9. 547. 6.vhCDR2, CHA. 9. 547. 6.vhCDR3, CHA. 9. 547. 6.vlCDR1, CHA. 9. 547. 6.vlCDR2 and CHA. 9. 547. 6.vhCDR3;
[0289] CHA.9.547.7, CHA. 9. 547. 7VH, CHA. 9. 547. 7.VL, CHA. 9. 547. 7.HC, CHA. 9. 547. 7.LC, CHA. 9. 547. 7.H1, CHA. 9. 547. 7.H2, CHA. 9. 547. 7.H3; CHA.9.547.7.H4, CHA.9.547.7.H4(S241P), CHA. 9. 547. 7.vhCDR1, CHA. 9. 547. 7.vhCDR2, CHA. 9. 547. 7.vhCDR3, CHA. 9. 547. 7.vlCDR1, CHA. 9. 547. 7.vlCDR2 and CHA. 9. 547. 7.vhCDR3;
[0290] CHA.9.547.8, CHA. 9. 547. 8VH, CHA. 9. 547. 8.VL, CHA. 9. 547. 8.HC, CHA.9.547.8.LC, CHA. 9. 547. 8.H1, CHA. 9. 547. 8.H2, CHA. 9. 547. 8.H3; CHA.9.547.8.H4, CHA.9.547.8.H4(S241P), CHA. 9. 547. 8.vhCDR1, CHA. 9. 547. 8.vhCDR2, CHA. 9. 547. 8.vhCDR3, CHA. 9. 547. 8.vlCDR1, CHA. 9. 547. 8.vlCDR2 and CHA. 9. 547. 8.vhCDR3;
[0291] CHA.9.547.9, CHA.9.547.9, CHA.9.547.9VH, CHA.9.547.9.VL, CHA.9. 547.9.HC, CHA.9.547.9.LC, CHA.9.547.9.H1, CHA.9.547.9.H2, CHA.9.547.9.H3; CHA.9.547.9.H4, CHA.9.547.9.H4, CHA.9.547.9.H4(S241P), CHA.9.547.9.H4(S241P), CHA.9.547.9.vhCDR1, CHA.9.547.9.vhCDR2, CHA.9.547.9.vhCDR3, CHA.9.547.9.vlCDR1, CHA.9.547.9.v1CDR2 and CHA.9.547.9.vhCDR3;
[0292] CHA.9.547.13, CHA.9.547.13, CHA.9.547. 13VH, CHA.9. 547.13.VL, CHA.9. 547.13.HC, CHA. 9.547.13.LC, CHA. 9.547.13.H1, CHA.9.547.13.H2, CHA.9. 547.13.H3; CHA.9.547.13.H4, CHA.9.547.13.H4, CHA.9.547.13.H4(S241P), CHA.9.547.13.H4(S241P), CHA. 9. 547.13.vhCDR1, CHA.9.547.13.vhCDR2, CHA.9.547. 13.vhCDR3, CHA. 9. 547.13.vlCDR1, CHA. 9. 547.13.v1CDR2 and CHA. 9. 547. 13.vhCDR3;
[0293] CHA.9.541.1, CHA. 9. 541.1.VH, CHA. 9. 541.1.VL, CHA. 9. 541.1.HC, CHA. 9. 541.1.LC, CHA. 9. 541.1.H1, CHA. 9. 541.1.H2, CHA. 9. 541.1.H3; CHA.9.541.1.H4, CHA.9.541.1.H4(S241P), CHA. 9. 541.1.vhCDR1, CHA. 9. 541.1.vhCDR2, CHA. 9. 541.1.vhCDR3, CHA. 9. 541.1.vlCDR1, CHA. 9. 541.1.v1CDR2 and CHA. 9.541.1.vhCDR3;
[0294] CHA.9.541.3, CHA. 9. 541. 3.VH, CHA. 9. 541. 3.VL, CHA. 9. 541. 3.HC, CHA. 9. 541. 3.LC, CHA. 9. 541. 3.H1, CHA. 9. 541. 3.H2, CHA. 9. 541. 3.H3; CHA.9.541.3.H4, CHA.9.541.3.H4(S241P), CHA. 9. 541. 3.vhCDR1, CHA. 9. 541. 3.vhCDR2, CHA. 9. 541. 3.vhCDR3, CHA. 9. 541. 3.vlCDR1, CHA. 9. 541. 3.vlCDR2 and CHA. 9.541. 3.vhCDR3;
[0295] CHA.9.541.4, CHA. 9. 541.4.VH, CHA. 9. 541. 4.VL, CHA. 9. 541. 4.HC, CHA. 9. 541. 4.LC, CHA. 9. 541. 4.H1, CHA. 9. 541. 4.H2, CHA. 9. 541. 4.H3; CHA.9.541.4.H4, CHA.9.541.4.H4(S241P), CHA. 9. 541. 4.vhCDR1, CHA. 9. 541. 4.vhCDR2, CHA. 9. 541. 4.vhCDR3, CHA. 9. 541. 4.vlCDR1, CHA. 9. 541. 4.vlCDR2 and CHA. 9.541. 4.vhCDR3;
[0296] CHA.9.541.5, CHA. 9. 541. 5.VH, CHA. 9. 541. 5.VL, CHA. 9. 541. 5.HC, CHA. 9. 541. 5.LC, CHA. 9. 541. 5.H1, CHA. 9. 541. 5.H2, CHA. 9. 541. 5.H3; CHA.9.541.5.H4, CHA.9.541.5.H4(S241P), CHA. 9. 541. 5.vhCDR1, CHA. 9. 541. 5.vhCDR2, CHA. 9. 541. 5.vhCDR3, CHA. 9. 541. 5.vlCDR1, CHA. 9. 541. 5.vlCDR2 and CHA. 9.541. 5.vhCDR3;
[0297] CHA.9.541.6, CHA. 9. 541. 6.VH, CHA. 9. 541. 6.VL, CHA. 9. 541. 6.HC, CHA. 9. 541. 6.LC, CHA. 9. 541. 6.H1, CHA. 9. 541. 6.H2, CHA. 9. 541.6.H3; CHA.9.541.6.H4, CHA.9.541.6.H4(S241P), CHA. 9. 541. 6.vhCDR1, CHA. 9. 541. 6.vhCDR2, CHA. 9. 541. 6.vhCDR3, CHA. 9. 541. 6.vlCDR1, CHA. 9. 541. 6.vlCDR2 and CHA. 9.541. 6.vhCDR3;
[0298] CHA.9.541.7, CHA. 9. 541. 7.VH, CHA. 9. 541. 7.VL, CHA. 9. 541. 7.HC, CHA. 9. 541. 7.LC, CHA. 9. 541. 7.H1, CHA. 9. 541. 7.H2, CHA. 9. 541. 7.H3; CHA.9.541.7.H4, CHA.9.541.7.H4(S241P), CHA. 9. 541. 7.vhCDR1, CHA. 9. 541. 7.vhCDR2, CHA. 9. 541. 7.vhCDR3, CHA. 9. 541. 7.vlCDR1, CHA. 9. 541. 7.vlCDR2 and CHA. 9.541. 7.vhCDR3; and
[0299] CHA.9.541.8, CHA. 9. 541. 8.VH, CHA. 9. 541. 8.VL, CHA. 9. 541. 8.HC, CHA. 9. 541. 8.LC, CHA. 9. 541. 8.H1, CHA. 9. 541. 8.H2, CHA. 9. 541. 8.H3; CHA.9.541.8.H4, CHA.9.541.8.H4(S241P); CHA. 9. 541. 8vhCDR1, CHA. 9. 541. 8.vhCDR2, CHA. 9. 541. 8.vhCDR3, CHA. 9. 541. 8.vlCDR1, CHA. 9. 541. 8.vlCDR2 and CHA. 9.541. 8.vhCDR3.

[0300] In the case of scFvs comprising the CDRs of the antibodies above, these are labeled as scFvs that include a scFv comprising a variable heavy domain with the vhCDRs, a linker and a variable light domain with the vlCDRs, again as above in either orientation. Thus the invention includes the use of scFv-CHA.9.536.3.1, scFv-CHA.9.536.3, scFv-CHA.9.536.4, scFv-CHA.9.536.5, scFv-CHA.9.536.7, scFv-CHA.9.536.8, scFv-CHA.9.560.1, scFv-CHA.9.560.3, scFv-CHA.9.560.4, scFv-CHA.9.560.5, scFv-CHA.9.560.6, scFv-CHA.9.560.7, scFv-CHA.9.560.8, scFv-CHA.9.546.1, scFv-CHA.9.547.1, scFv-CHA.9.547.2, scFv-CHA.9.547.3, scFv-CHA.9.547.4, scFv-CHA.9.547.6, scFv-CHA.9.547.7, scFv-CHA.9.547.8, scFv-CHA.9.547.9, scFv-CHA.9.547.13, scFv-CHA.9.541.1, scFv-CHA.9.541.3, scFv-CHA.9.541.4, scFv-CHA.9.541.5, scFv-CHA.9.541.6, scFv-CHA.9.541.7 and scFv-CHA.9.541.8.

[0301] In addition, CHA.9.543 binds to TIGIT but does not block the TIGIT-PVR interaction.

[0302] As discussed herein, the invention further provides for the use of variants of the above components (CPA and CHA), including variants in the CDRs, as outlined above. Thus, the invention provides antibodies comprising a set of 6 CDRs as outlined herein that can contain one, two or three amino acid differences in the set of CDRs, as long as the antibody still binds to TIGIT. Suitable assays for testing whether an anti-TIGIT antibody that contains mutations as compared to the CDR sequences outlined herein are known in the art, such as Biacore assays.

[0303] In addition, the invention further provides for the use of variants of the above variable heavy and light chains. In this case, the variable heavy chains can be 80%, 90%, 95%, 98% or 99% identical to the “VH” sequences herein, and/or contain from 1, 2, 3, 4, 5, 6, 7, 8, 9, 10 amino acid changes, or more, when Fc variants are used. Variable light chains are provided that can be 80%, 90%, 95%, 98% or 99% identical to the “VL” sequences herein (and in particular CPA.9.086), and/or contain from 1, 2, 3, 4, 5, 6, 7, 8, 9, 10 amino acid changes, or more, when Fc variants are used. In these embodiments, the anti-TIGIT antibodies for use in the present invention still binds to TIGIT. Suitable assays for testing whether an anti-TIGIT antibody that contains mutations as compared to the CDR sequences outlined herein are known in the art, such as Biacore assays.

[0304] Similarly, heavy and light chains are provided that are 80%, 90%, 95%, 98% or 99% identical to the full length “HC” and “LC” sequences herein (and in particular CPA.9.086), and/or contain from 1, 2, 3, 4, 5, 6, 7, 8, 9, 10 amino acid changes, or more, when Fc variants are used. In these embodiments, the invention includes these variants as long as the anti-TIGIT antibody still binds to TIGIT. Suitable assays for testing whether an anti-TIGIT antibody that contains mutations as compared to the CDR sequences outlined herein are known in the art, such as Biacore assays.

[0305] In addition, the framework regions of the variable heavy and variable light chains of either the CPA or CHA antibodies herein can be humanized (or, in the case of the CHA antibodies, “rehumanized”, to the extent that alternative humanization methods can be done) as is known in the art (with occasional variants generated in the CDRs as needed), and thus humanized variants of the VH and VL chains of FIG. 23 can be generated (and in particular CPA.9.086). Furthermore, the humanized variable heavy and light domains can then be fused with human constant regions, such as the constant regions from IgG1, IgG2, IgG3 and IgG4 (including IgG4(S241P)).

[0306] In particular, as is known in the art, murine VH and VL chains can be humanized as is known in the art, for example, using the IgBLAST program of the NCBI website, as outlined in Ye et al. Nucleic Acids Res. 41:W34-W40 (2013), herein incorporated by reference in its entirety for the humanization methods. IgBLAST takes a murine VH and/or VL sequence and compares it to a library of known human germline sequences. As shown herein, for the humanized sequences generated herein, the databases used were IMGT human VH genes (F+ORF, 273 germline sequences) and IMGT human VL kappa genes (F+ORF, 74 germline sequences). An exemplary five CHA sequences were chosen: CHA.9.536, CHA9.560, CHA.9.546, CHA.9.547 and CHA.9.541 (see FIG. 3). For this embodiment of the humanization, human germline IGHV1-46(allele1) was chosen for all 5 as the acceptor sequence and the human heavy chain IGHJ4(allele1) joining region (J gene). For three of four (CHA.7.518, CHA.7.530, CHA.7.538_1 and CHA.7.538_2), human germline IGKV1-39(allele 1) was chosen as the acceptor sequence and human light chain IGKJ2(allele1) (J gene) was chosen. The J gene was chosen from human joining region sequences compiled at IMGT® the international ImMunoGeneTics information system as www.imgt.org. CDRs were defined according to the AbM definition (see www.bioinfo.org.uk/abs/). In some embodiments, the anti-TIGIT antibodies for use in the present invention include TIGIT binding portions or antigen binding domains wherein the V_{H} and V_{L} sequences of different TIGIT binding portions or antigen binding domains can be “mixed and matched” to create other TIGIT binding portions or antigen binding domains. TIGIT binding of such “mixed and matched” anti-TIGIT antibodies can be tested using the binding assays described above. e.g., ELISAs or Biacore assays). In some embodiments, when V_{H} and V_{L} chains are mixed and matched, a V_{H} sequence from a particular V_{H}/V_{L} pairing is replaced with a structurally similar V_{H} sequence. Likewise, in some embodiments, a V_{L} sequence from a particular V_{H}/V_{L} pairing is replaced with a structurally similar V_{L} sequence. For example, the V_{H} and V_{L} sequences of homologous antibodies are particularly amenable for mixing and matching.

[0307] Accordingly, the anti-TIGIT antibodies for use in the present invention can comprise CDR amino acid sequences selected from the group consisting of (a) sequences as listed herein; (b) sequences that differ from those CDR amino acid sequences specified in (a) by 1, 2, 3, 4, 5, 6, 7, 8, 9, 10 or more amino acid substitutions; (c) amino acid sequences having 90% or greater, 95% or greater, 98% or greater, or 99% or greater sequence identity to the sequences specified in (a) or (b); (d) a polypeptide having an amino acid sequence encoded by a polynucleotide having a nucleic acid sequence encoding the amino acids as listed herein. In particular, the anti-TIGIT antibody can comprise the antigen binding domain from the CPA.9.086 antibody which can have sequences selected from (a), (b), (c) or (d).

[0308] Additionally included in the definition of the anti-TIGIT antibodies for use in the present invention are antibodies that comprise TIGIT binding domains that share identity to the binding domains from the TIGIT antibodies enumerated herein. That is, in certain embodiments, an anti-TIGIT antibody according to the invention comprises heavy and light chain variable regions comprising amino acid sequences that are identical to all or part of the binding domains from the anti-TIGIT amino acid sequences of preferred anti-TIGIT antibodies, respectively, wherein the antibodies retain the desired functional properties of the parent anti-TIGIT antibodies. The percent identity between the two sequences is a function of the number of identical positions shared by the sequences (i.e., % homology=# of identical positions/total # of positions×100), taking into account the number of gaps, and the length of each gap, which need to be introduced for optimal alignment of the two sequences. The comparison of sequences and determination of percent identity between two sequences can be accomplished using a mathematical algorithm, as described in the non-limiting examples below.

[0309] The percent identity between two amino acid sequences can be determined using the algorithm of E. Meyers and W. Miller (Comput. Appl. Biosci., 4:11-17 (1988)) which has been incorporated into the ALIGN program (version 2.0), using a PAM120 weight residue table, a gap length penalty of 12 and a gap penalty of 4. In addition, the percent identity between two amino acid sequences can be determined using the Needleman and Wunsch (J. Mol. Biol. 48:444-453 (1970)) algorithm which has been incorporated into the GAP program in the GCG software package (available commercially), using either a Blossum 62 matrix or a PAM250 matrix, and a gap weight of 16, 14, 12, 10, 8, 6, or 4 and a length weight of 1, 2, 3, 4, 5, or 6.

[0310] In general, the percentage identity for comparison between TIGIT binding domains or antigen binding domains is at least 75%, at least 80%, at least 90%, with at least about 95%, 96%, 97%, 98% or 99% percent identity being preferred. The percentage identity may be along the whole amino acid sequence, for example the entire heavy or light chain or along a portion of the chains. For example, included within the definition of the anti-TIGIT antibodies for use in the present invention are those whose TIGIT binding portion or antigen binding domains shares identity along the entire variable region (for example, where the identity is 95% or 98% identical along the variable regions), or along the entire constant region, or along just the Fc domain. In particular, the anti-TIGIT antibodies for use in the present invention include antibodies that have TIGIT binding portions or antigen binding domains with at least 75%, at least 80%, at least 90%, with at least about 95%, 96%, 97%, 98%, or 99% percent identity being preferred, with the CPA.9.086 antibody.

[0311] In addition, also included are sequences that may have the identical CDRs but changes in the framework portions of the variable domain (or entire heavy or light chain). For example, anti-TIGIT antibodies for use in the present invention include those with CDRs identical to those shown in FIG. 3 but whose identity along the variable region can be lower, for example 95 or 98% percent identical. In particular, the invention provides for the use of anti-TIGIT antibodies that have TIGIT binding portions or antigen binding domains with identical CDRs to CPA.9.086 but with framework regions that are 95% or 98% identical to CPA.9.086.

### D. Anti-TIGIT Antibodies in Combination with Anti-PD-1 Antibodies

[0312] In another embodiment, the invention provides combinations of the anti-TIGIT antibodies of the invention and anti-PD-1 antibodies. There are two approved anti-PD-1 antibodies, pembrolizumab (Keytruda®) and nivolumab (Opdivo®) and many more in development which can be used in combination with the anti-TIGIT antibodies of the invention.

[0313] Accordingly, the invention provides the specific combinations of: CPA.9.083.H4(S241P) as shown in FIG. 3F with pembrolizumab; CPA.9.083.H4(S241P) as shown in FIG. 3F with nivolumab; CPA.9.086.H4(S241P) as shown in FIG. 3G with pembrolizumab; CPA.9.086.H4(S241P) as shown in FIG. 3G with nivolumab; CHA.9.547.7H4(S241P) as shown in FIG. 4HH with pembrolizumab; CHA.9.547.7H4(S241P) as shown in FIG. 3HH with nivolumab; CHA.9.547.13.H4(S241P) as shown in FIG. 3VV with pembrolizumab and CHA.9.547.13.H4(S241P) as shown in FIG. 3VV with nivolumab; all from FIG. 4 of U.S. Ser. No. 62/513,916, entitled “Anti-TIGIT Antibodies and Methods of Use”, filed on Jun. 1, 2017, by assignee Compugen. Other anti-TIGIT antibodies that can be combined with anti-PD-1 antibodies are provided in FIG. 3 as well.

### E. Specific Anti-PVRIG Antibodies

[0314] The invention provides antigen binding domains, including full length antibodies, which contain a number of specific, enumerated sets of 6 CDRs and defined variable heavy (vh, VH or V_{H}) and variable light (vl, VL or V_{L}), that bind to PVRIG.

[0315] In one embodiment, the anti-PVRIG antibody is an antibody comprising a set of six CDRs (vhCDR1, vhCDR2, vhCDR3, vlCDR1, vlCDR2 and vlCDR3) from CHA.7.518.1.H4(S241P) as depicted in FIG. 5. In one embodiment, the anti-TIGIT antibody is an antibody comprising the variable heavy (vh) and variable light (vl) domains from CHA.7.518.1.H4(S241P) as depicted in FIG. 5, linked to a human IgG constant domain of IgG1, IgG2, IgG3, IgG4 and IgG4(S241P). In one embodiment, the anti-TIGIT antibody is CHA.7.518.1.H4(S241P). In some embodiments, the anti-PVRIG antibody is an anti-PVRIG antibody as shown in FIG. 5 or FIG. 63.

[0316] In particular, the 2H6 anti-PVRIG antibody of Zhu et al., WO2017/041004, specifically incorporated herein by reference, can be used, which has a vhCDR1 of SEQ ID NO:6, a vhCDR2 of SEQ ID NO:7, a vhCDR3 of SEQ ID NO:8, a vlCDR1 of SEQ ID NO:9, a vlCDR2 of SEQ ID NO:10 and a vhCDR3 of SEQ ID NO:11 from WO2017/041004. The 2H6 anti-PVRIG antibody of Zhu et al. has a variable heavy domain comprising SEQ ID NO:6 and a variable light domain comprising SEQ ID NO:3, which can be linked to a human IgG constant domain of IgG1, IgG2, IgG3, IgG4 and IgG4(S241P). All SEQ IDs in this paragraph are from WO2017/041004 and are also provided in FIG. 5.

[0317] In particular, the 334M5 anti-PVRIG antibody from WO2018/017864, specifically incorporated herein by reference, can be used, which has a vhCDR1 of SEQ ID NO:31, a vhCDR2 of SEQ ID NO:32, a vhCDR3 of SEQ ID NO:33, a vlCDR1 of SEQ ID NO:26, a vlCDR2 of SEQ ID NO:27, and a vhCDR3 of SEQ ID NO:28 from WO2018/017864. The 334M5 anti-PVRIG antibody from WO2018/017864 has a variable heavy domain comprising SEQ ID NO:30 and a variable light domain comprising SEQ ID NO:25, which can be linked to a human IgG constant domain of IgG1, IgG2, IgG3, IgG4 and IgG4(S241P). All SEQ IDs in this paragraph are from WO2018/017864 and are also provided in FIG. 5.

### F. Additional Anti-PVRIG Antibodies

[0318] The PVRIG antibodies which can find use in according to the triple combinations of the present invention are labeled as follows. These PVRIG antibodies described herein are labeled as follows. The PVRIG antibodies have reference numbers, for example “CPA.7.013”. This represents the combination of the variable heavy and variable light chains, as depicted in FIG. 63, for example. “CPA.7.013.VH” refers to the variable heavy portion of CPA.7.013, while “CPA.7.013.VL” is the variable light chain. “CPA.7.013.vhCDR1”, “CPA.7.013.vhCDR2”, “CPA.7.013.vhCDR3”, “CPA.7.013.vlCDR1”, “CPA.7.013.vlCDR2”, and “CPA.7.013.vlCDR3”, refers to the CDRs are indicated. “CPA.7.013.HC” refers to the entire heavy chain (e.g. variable and constant domain) of this molecule, and “CPA.7.013.LC” refers to the entire light chain (e.g. variable and constant domain) of the same molecule. “CPA.7.013.H1” refers to a full length antibody comprising the variable heavy and light domains, including the constant domain of Human IgG1 (hence, the H1; IgG1, IgG2, IgG3 and IgG4, as provided in FIG. 1, for example). Accordingly, “CPA.7.013.H2” would be the CPA.7.013 variable domains linked to a Human IgG2. “CPA.7.013.H3” would be the CPA.7.013 variable domains linked to a Human IgG3, and “CPA.7.013.H4” would be the CPA.7.013 variable domains linked to a Human IgG4.

[0319] The PVRIG antibodies which can find use in according to the triple combinations of the present invention are labeled as follows. The antibodies have reference numbers, for example “CHA.7.518.1”. This represents the combination of the variable heavy and variable light chains, as depicted in FIGS. 5 and 63, for example, with the understanding that these antibodies include two heavy chains and two light chains. “CPA. 7.518.1.VH” refers to the variable heavy portion of CPA. 7.518.1, while “CPA.7.518.1 VL” is the variable light chain. “CPA. 7.518.1.vhCDR1”, “CPA.7.518.1.vhCDR2”, “CPA. 7.518.1.vhCDR3”, “CPA. 7.518.1.vlCDR1”, “CPA. 7.518.1.vlCDR2”, and “CPA. 7.518.1.vlCDR3”, refers to the CDRs are indicated. “CPA. 7.518.1.HC” refers to the entire heavy chain (e.g. variable and constant domain) of this molecule, and “CPA. 7.518.1.LC” refers to the entire light chain (e.g. variable and constant domain) of the same molecule. In general, the human kappa light chain is used for the constant domain of each phage (or humanized hybridoma) antibody herein, although in some embodiments the lambda light constant domain is used. “CPA. 7.518.1.H1” refers to a full-length antibody comprising the variable heavy and light domains, including the constant domain of Human IgG1 (hence, the H1; IgG1, IgG2, IgG3 and IgG4, as provided in FIG. 1, for example). Accordingly, “CPA. 7.518.1.H2” would be the CPA. 7.518.1 variable domains linked to a Human IgG2. “CPA. 7.518.1.H3” would be the CPA. 7.518.1 variable domains linked to a Human IgG3, and “CPA. 7.518.1.H4” would be the CPA. 7.518.1 variable domains linked to a Human IgG4. Note that in some cases, the human IgGs may have additional mutations, such are described below, and this can be annotated. For example, in many embodiments, there may be a S241P mutation in the human IgG4, and this can be annotated as “CPA. 7.518.1.H4(S241P)” for example. The human IgG4 sequence with this S241P hinge variant is shown in FIG. 1. Other potential variants are IgG1(N297A), (or other variants that ablate glycosylation at this site and thus many of the effector functions associated with FcγRIIIa binding), and IgG1(D265A), which reduces binding to FcγR receptors. The anti-PVRIG antibodies for use in the present invention can comprise any of the PVRIG antibody sequences. The anti-PVRIG antibodies for use in the present invention can comprise any of the PVRIG antigen binding domain sequences.

[0320] The invention further provides variable heavy and light domains as well as full length heavy and light chains, any of which can be employed as part of the anti-PVRIG antibodies for use according to the present invention.

[0321] In some embodiments, the invention provides scFvs that bind to PVRIG comprising a variable heavy domain and a variable light domain linked by an scFv linker as outlined above. The VL and VH domains can be in either orientation, e.g. from N- to C-terminus “VH-linker-VL” or “VL-linker” VH”. These are named by their component parts; for example, “scFv-CHA.7.518.1VH-linker-VL” or “scFv-CPA. 7.518.1.VL-linker-VH.” Thus, “scFv-CPA. 7.518.1” can be in either orientation. The anti-PVRIG antibodies for use in the present invention can comprise an scFv that binds to PVRIG.

[0322] The invention provides antigen binding domains, including full length antibodies, which contain a number of specific, enumerated sets of 6 CDRs. The anti-PVRIG antibodies for use in the present invention can comprise any of the sets of 6 CDRs from the PVRIG antibody sequences provided herein.

[0323] The invention further provides variable heavy and light domains as well as full length heavy and light chains.

[0324] In many embodiments, the anti-PVRIG antibodies for use in the present invention are human (derived from phage) and block binding of PVRIG and PVLR2. The anti-PVRIG antibodies of the invention can comprise a PVRIG antibody and/or antigen binding domain sequence capable of both binding and blocking the receptor-ligand interaction. The anti-PVRIG can comprise the CDRs from a PVRIG antibody sequence capable of both binding and blocking the receptor-ligand interaction. The CPA antibodies, as well as the CDR sequences, that both bind and block the receptor-ligand interaction are as below, with their components outlined as well, the sequences for which are shown in FIG. 63:
[0325] CPA.7.001, CPA.7.001.VH, CPA.7.001.VL, CPA.7.001.HC, CPA.7.001.LC and CPA.7.001.H1, CPA.7.001.H2, CPA.7.001.H3, CPA.7.001.H4; CPA.7.001.vhCDR1, CPA.7.001.vhCDR2, CPA.7.001.vhCDR3, CPA.7.001.vlCDR1, CPA.7.001.vlCDR2, and CPA.7.001.vlCDR3;
[0326] CPA.7.003, CPA.7.003.VH, CPA.7.003.VL, CPA.7.003.HC, CPA.7.003.LC, CPA.7.003.H1, CPA.7.003.H2, CPA.7.003.H3, CPA.7.003.H4; CPA.7.003.vhCDR1, CPA.7.003.vhCDR2, CPA.7.003.vhCDR3, CPA.7.003.vlCDR1, CPA.7.003.vlCDR2, and CPA.7.003.vlCDR3;
[0327] CPA.7.004, CPA.7.004.VH, CPA.7.004.VL, CPA.7.004.HC, CPA.7.004.LC, CPA.7.004.H1, CPA.7.004.H2, CPA.7.004.H3 CPA.7.004.H4; CPA.7.004.vhCDR1, CPA.7.004.vhCDR2, CPA.7.004.vhCDR3, CPA.7.004.vlCDR1, CPA.7.004.vlCDR2, and CPA.7.004.vlCDR3;
[0328] CPA.7.006, CPA.7.006.VH, CPA.7.006.VL, CPA.7.006.HC, CPA.7.006.LC, CPA.7.006.H1, CPA.7.006.H2, CPA.7.006.H3 CPA.7.006.H4; CPA.7.006.vhCDR1, CPA.7.006.vhCDR2, CPA.7.006.vhCDR3, CPA.7.006.vlCDR1, CPA.7.006.vlCDR2, and CPA.7.006.vlCDR3;
[0329] CPA.7.008, CPA.7.008.VH, CPA.7.008.VL, CPA.7.008.HC, CPA.7.008.LC, CPA.7.008.H1, CPA.7.008.H2, CPA.7.008.H3 CPA.7.008.H4; CPA.7.008.vhCDR1, CPA.7.008.vhCDR2, CPA.7.008.vhCDR3, CPA.7.008.vlCDR1, CPA.7.008.v1CDR2, and CPA.7.008.v1CDR3;
[0330] CPA.7.009, CPA.7.009.VH, CPA.7.009.VL, CPA.7.009.HC, CPA.7.009.LC, CPA.7.009.H1, CPA.7.009.H2, CPA.7.009.H3 CPA.7.009.H4; CPA.7.009.vhCDR1, CPA.7.009.vhCDR2, CPA.7.009.vhCDR3, CPA.7.009.vlCDR1, CPA.7.009.v1CDR2, and CPA.7.009.v1CDR3;
[0331] CPA.7.010, CPA.7.010.VH, CPA.7.010.VL, CPA.7.010.HC, CPA.7.010.LC, CPA.7.010.H1, CPA.7.010.H2, CPA.7.010.H3 CPA.7.010.H4; CPA.7.010.vhCDR1, CPA.7.010.vhCDR2, CPA.7.010.vhCDR3, CPA.7.010.vlCDR1, CPA.7.010.v1CDR2, and CPA.7.010.v1CDR3;
[0332] CPA.7.011, CPA.7.011.VH, CPA.7.011.VL, CPA.7.011.HC, CPA.7.011.LC, CPA.7.011.H1, CPA.7.011.H2, CPA.7.011.H3 CPA.7.011.H4; CPA.7.011.vhCDR1, CPA.7.011.vhCDR2, CPA.7.011.vhCDR3, CPA.7.011.vlCDR1, CPA.7.011.v1CDR2, and CPA.7.011.v1CDR3;
[0333] CPA.7.012, CPA.7.012.VH, CPA.7.012.VL, CPA.7.012.HC, CPA.7.012.LC, CPA.7.012.H1, CPA.7.012.H2, CPA.7.012.H3 CPA.7.012.H4; CPA.7.012.vhCDR1, CPA.7.012.vhCDR2, CPA.7.012.vhCDR3, CPA.7.012.vlCDR1, CPA.7.012.v1CDR2, and CPA.7.012.v1CDR3;
[0334] CPA.7.013, CPA.7.013.VH, CPA.7.013.VL, CPA.7.013.HC, CPA.7.013.LC, CPA.7.013.H1, CPA.7.013.H2, CPA.7.013.H3 CPA.7.013.H4; CPA.7.013.vhCDR1, CPA.7.013.vhCDR2, CPA.7.013.vhCDR3, CPA.7.013.vlCDR1, CPA.7.013.v1CDR2, and CPA.7.013.v1CDR3;
[0335] CPA.7.014, CPA.7.014.VH, CPA.7.014.VL, CPA.7.014.HC, CPA.7.014.LC, CPA.7.014.H1, CPA.7.014.H2, CPA.7.014.H3 CPA.7.014.H4; CPA.7.014.vhCDR1, CPA.7.014.vhCDR2, CPA.7.014.vhCDR3, CPA.7.014.vlCDR1, CPA.7.014.v1CDR2, and CPA.7.014.v1CDR3;
[0336] CPA.7.015, CPA.7.015.VH, CPA.7.015.VL, CPA.7.015.HC, CPA.7.015.LC, CPA.7.015.H1, CPA.7.015.H2, CPA.7.015.H3 CPA.7.015.H4; CPA.7.015.vhCDR1, CPA.7.015.vhCDR2, CPA.7.015.vhCDR3, CPA.7.015.vlCDR1, CPA.7.015.v1CDR2, and CPA.7.015.v1CDR3;
[0337] CPA.7.017, CPA.7.017.VH, CPA.7.017.VL, CPA.7.017.HC, CPA.7.017.LC, CPA.7.017H1, CPA.7.017.H2, CPA.7.017.H3 CPA.7.017.H4; CPA.7.017.vhCDR1, CPA.7.000171.vhCDR2, CPA.7.017.vhCDR3, CPA.7.017.vlCDR1, CPA.7.017.v1CDR2, and CPA.7.017.v1CDR3;
[0338] CPA.7.018, CPA.7.018.VH, CPA.7.018.VL, CPA.7.018.HC, CPA.7.018.LC, CPA.7.018.H1, CPA.7.018.H2, CPA.7.018.H3 CPA.7.018.H4; CPA.7.017.vhCDR1, CPA.7.017.vhCDR2, CPA.7.017.vhCDR3, CPA.7.017.vlCDR1, CPA.7.017.v1CDR2, and CPA.7.017.v1CDR3;
[0339] CPA.7.019, CPA.7.019.VH, CPA.7.019.VL, CPA.7.019.HC, CPA.7.019.LC, CPA.7.019.H1, CPA.7.019.H2, CPA.7.019.H3 CPA.7.019.H4; CPA.7.019.vhCDR1, CPA.7.019.vhCDR2, CPA.7.019.vhCDR3, CPA.7.019.vlCDR1, CPA.7.019.v1CDR2, and CPA.7.019.v1CDR3;
[0340] CPA.7.021, CPA.7.021.VH, CPA.7.021.VL, CPA.7.021.HC, CPA.7.021.LC, CPA.7.021.H1, CPA.7.021.H2, CPA.7.021.H3 CPA.7.021.H4; CPA.7.021.vhCDR1, CPA.7.021.vhCDR2, CPA.7.021.vhCDR3, CPA.7.021.vlCDR1, CPA.7.021.v1CDR2, and CPA.7.021.v1CDR3;
[0341] CPA.7.022, CPA.7.022.VH, CPA.7.022.VL, CPA.7.022.HC, CPA.7.022.LC, CPA.7.022.H1, CPA.7.022.H2, CPA.7.022.H3 CPA.7.022.H4; CPA.7.022.vhCDR1, CPA.7.022.vhCDR2, CPA.7.002201.vhCDR3, CPA.7.022.vlCDR1, CPA.7.022.v1CDR2, and CPA.7.022.v1CDR3;
[0342] CPA.7.023, CPA.7.023.VH, CPA.7.023.VL, CPA.7.023.HC, CPA.7.023.LC, CPA.7.023.H1, CPA.7.023.H2, CPA.7.023.H3 CPA.7.023.H4; CPA.7.023.vhCDR1, CPA.7.023.vhCDR2, CPA.7.023.vhCDR3, CPA.7.023.vlCDR1, CPA.7.023.v1CDR2, and CPA.7.023.v1CDR3;
[0343] CPA.7.024, CPA.7.024.VH, CPA.7.024.VL, CPA.7.024.HC, CPA.7.024.LC, CPA.7.024.H1, CPA.7.024.H2, CPA.7.024.H3 CPA.7.024.H4; CPA.7.024.vhCDR1, CPA.7.024.vhCDR2, CPA.7.024.vhCDR3, CPA.7.024.vlCDR1, CPA.7.024.v1CDR2, and CPA.7.024.v1CDR3;
[0344] CPA.7.033, CPA.7.033.VH, CPA.7.033.VL, CPA.7.033.HC, CPA.7.033.LC, CPA.7.033.H1, CPA.7.033.H2, CPA.7.033.H3 CPA.7.033.H4; CPA.7.033.vhCDR1, CPA.7.033.vhCDR2, CPA.7.033.vhCDR3, CPA.7.033.vlCDR1, CPA.7.033.v1CDR2, and CPA.7.033.v1CDR3;
[0345] CPA.7.034, CPA.7.034.VH, CPA.7.034.VL, CPA.7.034.HC, CPA.7.034.LC, CPA.7.034.H1, CPA.7.034.H2, CPA.7.034.H3 CPA.7.034.H4; CPA.7.034.vhCDR1, CPA.7.034.vhCDR2, CPA.7.034.vhCDR3, CPA.7.034.vlCDR1, CPA.7.034.v1CDR2, and CPA.7.034.v1CDR3;
[0346] CPA.7.036, CPA.7.036.VH, CPA.7.036.VL, CPA.7.036.HC, CPA.7.036.LC, CPA.7.036.H1, CPA.7.036.H2, CPA.7.036.H3 CPA.7.036.H4; CPA.7.036.vhCDR1, CPA.7.036.vhCDR2, CPA.7.036.vhCDR3, CPA.7.036.vlCDR1, CPA.7.036.v1CDR2, and CPA.7.036.v1CDR3;
[0347] CPA.7.040, CPA.7.040.VH, CPA.7.040.VL, CPA.7.040.HC, CPA.7.040.LC, CPA.7.040.H1, CPA.7.040.H2, CPA.7.040.H3 and CPA.7.040.H4; CPA.7.040.vhCDR1, CPA.7.040.vhCDR2, CPA.7.040.vhCDR3, CPA.7.040.vlCDR1, CPA.7.040.v1CDR2, and CPA.7.040.v1CDR3;
[0348] CPA.7.046, CPA.7.046.VH, CPA.7.046.VL, CPA.7.046.HC, CPA.7.046.LC, CPA.7.046.H1, CPA.7.046.H2, CPA.7.046.H3 CPA.7.046.H4; CPA.7.046.vhCDR1, CPA.7.046.vhCDR2, CPA.7.046.vhCDR3, CPA.7.046.vlCDR1, CPA.7.046.v1CDR2, and CPA.7.046.v1CDR3;
[0349] CPA.7.047, CPA.7.047.VH, CPA.7.047.VL, CPA.7.047.HC, CPA.7.047.LC, CPA.7.047.H1, CPA.7.047.H2, CPA.7.047.H3 CPA.7.047.H4; CPA.7.047.vhCDR1, CPA.7.047.vhCDR2, CPA.7.047.vhCDR3, CPA.7.047.vlCDR1, CPA.7.004701.v1CDR2, and CPA.7.047.v1CDR3;
[0350] CPA.7.049, CPA.7.049.VH, CPA.7.049.VL, CPA.7.049.HC, CPA.7.049.LC, CPA.7.049.H1, CPA.7.049.H2, CPA.7.049.H3 CPA.7.049.H4; CPA.7.049.vhCDR1, CPA.7.049.vhCDR2, CPA.7.049.vhCDR3, CPA.7.049.vlCDR1, CPA.7.049.v1CDR2, and CPA.7.049.v1CDR3; and
[0351] CPA.7.050, CPA.7.050.VH, CPA.7.050.VL, CPA.7.050.HC, CPA.7.050.LC, CPA.7.050.H1, CPA.7.050.H2, CPA.7.050.H3 CPA.7.050.H4, CPA.7.050.vhCDR1, CPA.7.050.vhCDR2, CPA.7.050.vhCDR3, CPA.7.050.vlCDR1, CPA.7.050.v1CDR2, and CPA.7.050.vlCDR3.

[0352] In addition, there are a number of CPA antibodies generated herein that bound to PVRIG but did not block the interaction of PVRIG and PVLR2. The anti-PVRIG antibodies for use in the present invention can comprise a PVRIG antibody and/or antigen binding domain sequence capable of binding but not blocking the receptor-ligand interaction. The anti-PVRIG for use in the present invention can comprise the CDRs from a PVRIG antibody sequence capable of sequence capable of binding but not blocking the receptor-ligand interaction. The CPA antibodies, as well as the CDR sequences, that bind but do not block the receptor-ligand interaction are as below, with their components outlined as well, the sequences for which are shown in FIG. 63:
[0353] CPA.7.028, CPA.7.028.VH, CPA.7.028.VL, CPA.7.028.HC, CPA.7.028.LC, CPA.7.028.H1, CPA.7.028.H2, CPA.7.028.H3 and CPA.7.028.H4; CPA.7.028.vhCDR1, CPA.7.028.vhCDR2, CPA.7.028.vhCDR3, CPA.7.028.vlCDR1, CPA.7.028.vlCDR2, and CPA.7.028.vlCDR3.
[0354] CPA.7.030, CPA.7.030.VH, CPA.7.030.VL, CPA.7.030.HC, CPA.7.030.LC, CPA.7.030.H1, CPA.7.030.H2, CPA.7.030.H3 and CPA.7.030.H4; CPA.7.030.vhCDR1, CPA.7.030.vhCDR2, CPA.7.030.vhCDR3, CPA.7.030.vlCDR1, CPA.7.030.vlCDR2, and CPA.7.030.vlCDR3.
[0355] CPA.7.041, CPA.7.041 VH, CPA.7.041 VL, CPA.7.041.HC, CPA.7.041.LC, CPA.7.041.H1, CPA.7.041.H2, CPA.7.041.H3 and CPA.7.041.H4; CPA.7.041.vhCDR1, CPA.7.041.vhCDR2, CPA.7.041.vhCDR3, CPA.7.041.vlCDR1, CPA.7.041.vlCDR2, and CPA.7.041.vlCDR3.
[0356] CPA.7.016, CPA.7.016.VH, CPA.7.016.VL, CPA.7.016.HC, CPA.7.016.LC, CPA.7.016.H1, CPA.7.016.H2, CPA.7.016.H3 and CPA.7.016.H4; CPA.7.016.vhCDR1, CPA.7.016.vhCDR2, CPA.7.016.vhCDR3, CPA.7.016.vlCDR1, CPA.7.016.vlCDR2, and CPA.7.016.vlCDR3.
[0357] CPA.7.020, CPA.7.020.VH, CPA.7.020.VL, CPA.7.020.HC, CPA.7.020.LC, CPA.7.020.H1, CPA.7.020.H2, CPA.7.020.H3 and CPA.7.020.H4; CPA.7.020.vhCDR1, CPA.7.020.vhCDR2, CPA.7.020.vhCDR3, CPA.7.020.vlCDR1, CPA.7.020.vlCDR2, and CPA.7.020.vlCDR3.
[0358] CPA.7.038, CPA.7.038.VH, CPA.7.038.VL, CPA.7.038.HC, CPA.7.038.LC, CPA.7.038.H1, CPA.7.038.H2, CPA.7.038.H3 and CPA.7.038.H4; CPA.7.038.vhCDR1, CPA.7.038.vhCDR2, CPA.7.038.vhCDR3, CPA.7.038.vlCDR1, CPA.7.038.vlCDR2, and CPA.7.038.vlCDR3.
[0359] CPA.7.044, CPA.7.044.VH, CPA.7.044.VL, CPA.7.044.HC, CPA.7.044.LC, CPA.7.044.H1, CPA.7.044.H2, CPA.7.044.H3 and CPA.7.044.H4; CPA.7.044.vhCDR1, CPA.7.044.vhCDR2, CPA.7.044.vhCDR3, CPA.7.044.vlCDR1, CPA.7.044.vlCDR2, and CPA.7.044.vlCDR3.
[0360] CPA.7.045, CPA.7.045.VH, CPA.7.045.VL, CPA.7.045.HC, CPA.7.045.LC, CPA.7.045.H1, CPA.7.045.H2, CPA.7.045.H3 and CPA.7.045.H4; CPA.7.045.vhCDR1, CPA.7.045.vhCDR2, CPA.7.045.vhCDR3, CPA.7.045.vlCDR1, CPA.7.045.v1CDR2, and CPA.7.045.vlCDR3.

[0361] As discussed herein, the invention further provides variants of the above components, including variants in the CDRs, as outlined above. In addition, variable heavy chains can be 80%, 90%, 95%, 98% or 99% identical to the “VH” sequences herein, and/or contain from 1, 2, 3, 4, 5, 6, 7, 8, 9, 10 amino acid changes, or more, when Fc variants are used. Variable light chains are provided that can be 80%, 90%, 95%, 98% or 99% identical to the “VL” sequences herein, and/or contain from 1, 2, 3, 4, 5, 6, 7, 8, 9, 10 amino acid changes, or more, when Fc variants are used. Similarly, heavy and light chains are provided that are 80%, 90%, 95%, 98% or 99% identical to the “HC” and “LC” sequences herein, and/or contain from 1, 2, 3, 4, 5, 6, 7, 8, 9, 10 amino acid changes, or more, when Fc variants are used. The anti-PVRIG for use in the present invention can comprise any of these PVRIG antibody and/or antigen bindgin domain sequences.

[0362] Furthermore, the present invention provides a number of CHA antibodies, which are murine antibodies generated from hybridomas. As is well known the art, the six CDRs are useful when put into either human framework variable heavy and variable light regions or when the variable heavy and light domains are humanized. See, for example, FIGS. 5 and 63.

[0363] The anti-PVRIG for use in the present the invention can comprise any of the following CHA sets of CDRs from PVRIG antibody sequences. Accordingly, the present invention provides for the use of anti-PVRIG that comprise the following CHA sets of CDRs, the sequences of which are shown in FIG. 5 and/or FIG. 63:
[0364] CHA.7.502.vhCDR1, CHA.7.502.vhCDR2, CHA.7.502.vhCDR3, CHA.7.502.vlCDR1, CHA.7.502.v1CDR2, and CHA.7.502.v1CDR3.
[0365] CHA.7.503.vhCDR1, CHA.7.503.vhCDR2, CHA.7.503.vhCDR3, CHA.7.503.vlCDR1, CHA.7.503.v1CDR2, and CHA.7.503.v1CDR3.
[0366] CHA.7.506.vhCDR1, CHA.7.506.vhCDR2, CHA.7.506.vhCDR3, CHA.7.506.vlCDR1, CHA.7.506.v1CDR2, and CHA.7.506.v1CDR3.
[0367] CHA.7.508.vhCDR1, CHA.7.508.vhCDR2, CHA.7.508.vhCDR3, CHA.7.508.vlCDR1, CHA.7.508.v1CDR2, and CHA.7.508.v1CDR3.
[0368] CHA.7.510.vhCDR1, CHA.7.510.vhCDR2, CHA.7.510.vhCDR3, CHA.7.510.vlCDR1, CHA.7.510.v1CDR2, and CHA.7.510.v1CDR3.
[0369] CHA.7.512.vhCDR1, CHA.7.512.vhCDR2, CHA.7.512.vhCDR3, CHA.7.512.vlCDR1, CHA.7.512.v1CDR2, and CHA.7.512.v1CDR3.
[0370] CHA.7.514.vhCDR1, CHA.7.514.vhCDR2, CHA.7.514.vhCDR3, CHA.7.514.vlCDR1, CHA.7.514.v1CDR2, and CHA.7.514.v1CDR3.
[0371] CHA.7.516.vhCDR1, CHA.7.516.vhCDR2, CHA.7.516.vhCDR3, CHA.7.516.vlCDR1, CHA.7.516.v1CDR2, and CHA.7.516.v1CDR3.
[0372] CHA.7.518.vhCDR1, CHA.7.518.vhCDR2, CHA.7.518.vhCDR3, CHA.7.518.vlCDR1, CHA.7.518.v1CDR2, and CHA.7.518.v1CDR3.
[0373] CHA.7.520_1.vhCDR1, CHA.7.520_1.vhCDR2, CHA.7.520_1.vhCDR3, CHA.7.520_1.vlCDR1, CHA.7.520_1.vlCDR2, and CHA.7.520_1.vlCDR3.
[0374] CHA.7.520_2.vhCDR1, CHA.7.520_2.vhCDR2, CHA.7.520_2.vhCDR3, CHA.7.520_2.vlCDR1, CHA.7.520_2.vlCDR2, and CHA.7.520_2.vlCDR3.
[0375] CHA.7.522.vhCDR1, CHA.7.522.vhCDR2, CHA.7.522.vhCDR3, CHA.7.522.vlCDR1, CHA.7.522.v1CDR2, and CHA.7.522.v1CDR3.
[0376] CHA.7.524.vhCDR1, CHA.7.524.vhCDR2, CHA.7.524.vhCDR3, CHA.7.524.vlCDR1, CHA.7.524.v1CDR2, and CHA.7.524.v1CDR3.
[0377] CHA.7.526.vhCDR1, CHA.7.526.vhCDR2, CHA.7.526.vhCDR3, CHA.7.526.vlCDR1, CHA.7.526.v1CDR2, and CHA.7.526.v1CDR3.
[0378] CHA.7.527.vhCDR1, CHA.7.527.vhCDR2, CHA.7.527.vhCDR3, CHA.7.527.vlCDR1, CHA.7.527.v1CDR2, and CHA.7.527.v1CDR3.
[0379] CHA.7.528.vhCDR1, CHA.7.528.vhCDR2, CHA.7.528.vhCDR3, CHA.7.528.vlCDR1, CHA.7.528.v1CDR2, and CHA.7.528.v1CDR3.
[0380] CHA.7.530.vhCDR1, CHA.7.530.vhCDR2, CHA.7.530.vhCDR3, CHA.7.530.vlCDR1, CHA.7.530.v1CDR2, and CHA.7.530.v1CDR3.
[0381] CHA.7.534.vhCDR1, CHA.7.534.vhCDR2, CHA.7.534.vhCDR3, CHA.7.534.vlCDR1, CHA.7.534.v1CDR2, and CHA.7.534.v1CDR3.
[0382] CHA.7.535.vhCDR1, CHA.7.535.vhCDR2, CHA.7.535.vhCDR3, CHA.7.535.vlCDR1, CHA.7.535.v1CDR2, and CHA.7.535.v1CDR3.
[0383] CHA.7.537.vhCDR1, CHA.7.537.vhCDR2, CHA.7.537.vhCDR3, CHA.7.537.vlCDR1, CHA.7.537.v1CDR2, and CHA.7.537.v1CDR3.
[0384] CHA.7.538_1.vhCDR1, CHA.7.538_1.vhCDR2, CHA.7.538_1.vhCDR3, CHA.7.538_1.vlCDR1, CHA.7.538_1.vlCDR2, and CHA.7.538_1.vlCDR3.
[0385] CHA.7.538_2.vhCDR1, CHA.7.538_2.vhCDR2, CHA.7.538_2.vhCDR3, CHA.7.538_2.vlCDR1, CHA.7.538_2.vlCDR2, and CHA.7.538_2.vlCDR3.
[0386] CHA.7.543.vhCDR1, CHA.7.543.vhCDR2, CHA.7.543.vhCDR3, CHA.7.543.vlCDR1, CHA.7.543.v1CDR2, and CHA.7.543.v1CDR3.
[0387] CHA.7.544.vhCDR1, CHA.7.544.vhCDR2, CHA.7.544.vhCDR3, CHA.7.544.vlCDR1, CHA.7.544.v1CDR2, and CHA.7.544.v1CDR3.
[0388] CHA.7.545.vhCDR1, CHA.7.545.vhCDR2, CHA.7.545.vhCDR3, CHA.7.545.vlCDR1, CHA.7.545.v1CDR2, and CHA.7.545.v1CDR3.
[0389] CHA.7.546.vhCDR1, CHA.7.546.vhCDR2, CHA.7.546.vhCDR3, CHA.7.546.vlCDR1, CHA.7.546.v1CDR2, and CHA.7.546.v1CDR3.
[0390] CHA.7.547.vhCDR1, CHA.7.547.vhCDR2, CHA.7.547.vhCDR3, CHA.7.547.vlCDR1, CHA.7.547.v1CDR2, and CHA.7.547.v1CDR3.
[0391] CHA.7.548.vhCDR1, CHA.7.548.vhCDR2, CHA.7.548.vhCDR3, CHA.7.548.vlCDR1, CHA.7.548.v1CDR2, and CHA.7.548.v1CDR3.
[0392] CHA.7.549.vhCDR1, CHA.7.549.vhCDR2, CHA.7.549.vhCDR3, CHA.7.549.vlCDR1, CHA.7.549.vlCDR2, and CHA.7.549.vlCDR3.
[0393] CHA.7.550.vhCDR1, CHA.7.550.vhCDR2, CHA.7.550.vhCDR3, CHA.7.550.vlCDR1, CHA.7.550.vlCDR2, and CHA.7.550.vlCDR3.

[0394] As above, these sets of CDRs may also be amino acid variants as described above.

[0395] In addition, the framework regions of the variable heavy and variable light chains can be humanized as is known in the art (with occasional variants generated in the CDRs as needed), and thus humanized variants of the VH and VL chains of FIG. 63 can be generated. Furthermore, the humanized variable heavy and light domains can then be fused with human constant regions, such as the constant regions from IgG1, IgG2, IgG3 and IgG4.

[0396] In particular, as is known in the art, murine VH and VL chains can be humanized as is known in the art, for example, using the IgBLAST program of the NCBI website, as outlined in Ye et al. Nucleic Acids Res. 41:W34-W40 (2013), herein incorporated by reference in its entirety for the humanization methods. IgBLAST takes a murine VH and/or VL sequence and compares it to a library of known human germline sequences. As shown herein, for the humanized sequences generated herein, the databases used were IMGT human VH genes (F+ORF, 273 germline sequences) and IMGT human VL kappa genes (F+ORF, 74 germline sequences). An exemplary five CHA sequences were chosen: CHA.7.518, CHA.7.530, CHA.7.538_1, CHA.7.538_2 and CHA.7.524 (see FIGS. 5 and 63 for the VH and VL sequences). For this embodiment of the humanization, human germline IGHV1-46(allele1) was chosen for all 5 as the acceptor sequence and the human heavy chain IGHJ4(allele1) joining region (J gene). For three of four (CHA.7.518, CHA.7.530, CHA.7.538_1 and CHA.7.538_2), human germline IGKV1-39(allele 1) was chosen as the acceptor sequence and human light chain IGKJ2(allele1) (J gene) was chosen. The J gene was chosen from human joining region sequences compiled at IMGT® the international ImMunoGeneTics information system as www.imgt.org. CDRs were defined according to the AbM definition (see www.bioinfo.org.uk/abs/). FIG. 63 also depicts humanized sequences as well as some potential changes to optimize binding to PVRIG. The anti-PVRIG antibodies for use in the present invention can comprise any of these humanized PVRIG antibody or antigen bindgin domain sequences.

[0397] Specific humanized antibodies of CHA antibodies include those shown in FIGS. 5 and 63, for example. The anti-PVRIG for use in the present invention can comprise CHA PVRIG antibody sequences as shown in FIG. 5 or 63. As will be appreciated by those in the art, each humanized variable heavy (Humanized Heavy; HH) and variable light (Humanized Light, HL) sequence can be combined with the constant regions of human IgG1, IgG2, IgG3 and IgG4. That is, CHA.7.518.HH1 is the first humanized variable heavy chain, and CHA.7.518.HH1.1 is the full length heavy chain, comprising the “H1” humanized sequence with a IgG1 constant region (CHA.7.518.HH1.2 is CHA.7.518.HH1 with IgG2, etc.).

[0398] In some embodiments, the anti-PVRIG antibodies for use in the present invention include anti-PVRIG antibodies wherein the V_{H} and V_{L} sequences of different anti-PVRIG antibodies can be “mixed and matched” to create other anti-PVRIG antibodies. PVRIG binding of such “mixed and matched” antibodies can be tested using the binding assays described above. e.g., ELISAs). In some embodiments, when V_{H} and V_{L} chains are mixed and matched, a V_{H} sequence from a particular V_{H}/V_{L} pairing is replaced with a structurally similar V_{H} sequence. Likewise, in some embodiments, a V_{L} sequence from a particular V_{H}/V_{L} pairing is replaced with a structurally similar V_{L} sequence. For example, the V_{H} and V_{L} sequences of homologous antibodies are particularly amenable for mixing and matching. The anti-PVRIG for use in the present invention can comprise PVRIG V_{H} and V_{L} sequences from different anti-PVRIG antibodies that have been “mixed and matched”.

[0399] Accordingly, the antibodies of the invention comprise CDR amino acid sequences selected from the group consisting of (a) sequences as listed herein; (b) sequences that differ from those CDR amino acid sequences specified in (a) by 1, 2, 3, 4, 5, 6, 7, 8, 9, 10 or more amino acid substitutions; (c) amino acid sequences having 90% or greater, 95% or greater, 98% or greater, or 99% or greater sequence identity to the sequences specified in (a) or (b); (d) a polypeptide having an amino acid sequence encoded by a polynucleotide having a nucleic acid sequence encoding the amino acids as listed herein. The anti-PVRIG for use in the present invention can comprise PVRIG variant CDR sequences.

[0400] Additionally included in the definition of PVRIG antibodies are antibodies that share identity to the anti-PVRIG antibodies enumerated herein. That is, in certain embodiments, an anti-PVRIG antibody according to the invention comprises heavy and light chain variable regions comprising amino acid sequences that are homologous to isolated anti-PVRIG amino acid sequences of preferred anti-PVRIG immune molecules, respectively, wherein the antibodies retain the desired functional properties of the parent anti-PVRIG antibodies. The percent identity between the two sequences is a function of the number of identical positions shared by the sequences (e.g., % homology=# of identical positions/total # of positions ×100), taking into account the number of gaps, and the length of each gap, which need to be introduced for optimal alignment of the two sequences. The comparison of sequences and determination of percent identity between two sequences can be accomplished using a mathematical algorithm, as described in the non-limiting examples below. The anti-PVRIG antibodies for use in the present the invention can comprise heavy and light chain variable regions comprising amino acid sequences that are homologous to isolated anti-PVRIG amino acid sequences as described herein.

[0401] The percent identity between two amino acid sequences can be determined using the algorithm of E. Meyers and W. Miller (Comput. Appl. Biosci., 4:11-17 (1988)) which has been incorporated into the ALIGN program (version 2.0), using a PAM120 weight residue table, a gap length penalty of 12 and a gap penalty of 4. In addition, the percent identity between two amino acid sequences can be determined using the Needleman and Wunsch (J. Mol. Biol. 48:444-453 (1970)) algorithm which has been incorporated into the GAP program in the GCG software package (available commercially), using either a Blossum 62 matrix or a PAM250 matrix, and a gap weight of 16, 14, 12, 10, 8, 6, or 4 and a length weight of 1, 2, 3, 4, 5, or 6.

[0402] In general, the percentage identity for comparison between PVRIG antibodies is at least 75%, at least 80%, at least 90%, with at least about 95%, 96%, 97%, 98%, or 99% percent identity being preferred. The percentage identity may be along the whole amino acid sequence, for example the entire heavy or light chain or along a portion of the chains. For example, included within the definition of the anti-PVRIG antibodies of the invention are those that share identity along the entire variable region (for example, where the identity is 95% or 98% identical along the variable regions), or along the entire constant region, or along just the Fc domain.

### G. TIGIT Antibodies with Anti-Tumor Antibodies

[0403] In some embodiments, the anti-TIGIT antibodies of the invention are co-administered with antibodies that, unlike immuno-oncology/checkpoint inhibitors that generally act on the immune system to increase a patient's native immune response, instead are directed against a specific tumor target antigen (TTA). There are a wide number of anti-TTA antibodies either approved or in development that can be combined with the present TIGIT antibodies. Currently approved antibodies, include, but are not limited to, cetuximab, panitumumab, nimotuzumab (all to EGFR), rituximab (CD20), trastuzumab and pertuzumab (HER2), alemtuzumab (CD52), bevacizumab (VEGF), ofatumumab (CD20), denosumab (RANK ligand), brentuximab (CD30), daratumumab (CD38), ibritumomab (CD20) and ipilimumab (CTLA-4). Specific target oncology antibodies in clinical trials that can be combined with the anti-TIGIT antibodies herein include, but are not limited to, anti-CTLA4 mAbs, such as ipilimumab, tremelimumab (see, for Example U.S. Patent Publication No. 2017/0306025); anti-PD-1 such as nivolumab BMS-936558/MDX-1106/ONO-4538, AMP224, CT-011, MK-3475, anti-PD-L1 antagonists such as Atezolizumab (IMpower133), BMS-936559/MDX-1105, MEDI4736, RG-7446/MPDL3280A, as well as those described in U.S. Patent Publication No. 2017/0281764); anti-LAG-3 such as IMP-321, anti-TIM-3, anti-BTLA, anti-B7-H4, anti-B7-H3, Anti-VISTA; agonistic antibodies targeting immunostimulatory proteins, including anti-CD40 mAbs such as CP-870,893, lucatumumab, dacetuzumab; anti-CD137 mAbs such as BMS-663513 urelumab (anti-4-1BB; see, for example, U.S. Pat. Nos. 7,288,638 and 8,962,804, incorporated by reference herein in their entireties); PF-05082566 utomilumab (see, for example, U.S. Pat. Nos. 8,821,867; 8,337,850; and 9,468,678, as well as International Patent Application Publication No. WO 2012/032433, incorporated by reference herein in their entireties); anti-OX40 mAbs, such as anti-OX40 (see, for example, WO2006/029879 or WO2010096418, incorporated by reference herein in their entireties); anti-GITR mAbs such as TRX518 (see, for example, U.S. Pat. No. 7,812,135, incorporated by reference herein in its entirety); anti-CD27 mAbs, such as varlilumab CDX-1127 (see, for example, WO 2016/145085 and U.S. Patent Publication Nos. US 2011/0274685 and US 2012/0213771, incorporated by reference herein in their entireties) anti-ICOS mAbs (for example, MEDI-570, JTX-2011, and anti-TIM3 antibodies (see, for example, WO 2013/006490 or U.S. Patent Publication No. US 2016/0257758, incorporated by reference herein in their entireties), as well as monoclonal antibodies to prostate cancer, ovarian cancer, breast cancer, endometrial cancer, multiple myeloma, melanoma, lymphomas, lung cancers including small cell lung cancer, kidney cancer, colorectal cancer, pancreatic cancer, gastric cancer, brain cancer, (see generally www.clinicaltrials.gov).

### H. Specific Anti-PD-1 Antibodies

[0404] In another embodiment, the invention provides combinations of the anti-TIGIT antibodies of the invention and anti-PD-1 antibodies. There are two approved anti-PD-1 antibodies, pembrolizumab (Keytruda®; MK-3475-033), cemiplimab (REGN2810; see US20170174779), and nivolumab (Opdivo®; CheckMate078) and many more in development which can be used in combination with the anti-TIGIT antibodies of the invention. In other embodiments, the anti-PD-1 antibody can include, for example, SHR-1210 (CTR20160175 and CTR20170090), SHR-1210 (CTR20170299 and CTR20170322), JS-001 (CTR20160274), IBI308 (CTR20160735), BGB-A317 (CTR20160872) and/or a PD-1 antibody as recited in U.S. Patent Publication No. 2017/0081409. Exemplary anti-PD-1 antibody sequences are shown in FIG. 7 and any of these can be used with the combination therapy methods described herein.

[0405] In some embodiments, the anti-TIGIT antibodies of the invention are combined with anti-PVRIG antibodies as described herein as well as anti-PD-1 antibodies, as described herein or other anti-PD-1 antibodies known in the art, as a triple combination therapy.

### I. Specific Anti-PD-L1 Antibodies

[0406] In another embodiment, the invention provides combinations of the anti-TIGIT antibodies of the invention and anti-PD-L1 antibodies. There are three approved anti-PD-L1 antibodies, atezolizumab (TECENTRIQ®; MPDL3280A), avelumab (BAVENCIO®; MSB001071 8C), and Durvalumab (MEDI4736), as well as other anti-PD-L1 antibodies in development. Numerous anti-PD-L1 antibodies are available and many more in development which can be used in combination with the anti-TIGIT antibodies of the invention. In embodiments, the PD-L1 antibody is one described in U.S. Patent Publication No. 2017/0281764 as well as International Patent Publication No. WO 2013/079174 (avelumab) and WO 2010/077634 (or U.S. Patent Application No. 20160222117 or U.S. Pat. No. 8,217,149; atezolizumab). In some embodiments, the PD-L1 antibody comprises a heavy chain sequence of SEQ ID NO: 34 and a light chain sequence of SEQ ID NO: 36 (from US 2017/281764). In some embodiments, the PD-L1 antibody is atezolizumab (TECENTRIQ®; MPDL3280A; IMpower110). In some embodiments, the PD-L1 antibody is avelumab (BAVENCIO®; MSB001071 8C). In some embodiments, the PD-L1 antibody is durvalumab (MEDI4736). In some embodiments, the PD-L1 antibody includes, for example, Atezolizumab (IMpowerl33), BMS-936559/MDX-1105, and/or RG-7446/MPDL3280A, and/or YW243.55.570, as well as any of those provided herein in FIG. 62.

[0407] In some embodiments, the anti-TIGIT antibodies of the invention are combined with anti-PVRIG antibodies as described herein as well as anti-PD-L1 antibodies, as described herein or other anti-PD-L1 antibodies known in the art, as a triple combination therapy.

### J. Optional Antibody Engineering

[0408] The antibodies of the invention can be modified, or engineered, to alter the amino acid sequences by amino acid substitutions. As discussed herein, amino acid substitutions can be made to alter the affinity of the CDRs for the antigen (including both increasing and decreasing binding), as well as to alter additional functional properties of the antibodies. For example, the antibodies may be engineered to include modifications within the Fc region, typically to alter one or more functional properties of the antibody, such as serum half-life, complement fixation, Fc receptor binding, and/or antigen-dependent cellular cytotoxicity. Furthermore, an antibody according to at least some embodiments of the invention may be chemically modified (e.g., one or more chemical moieties can be attached to the antibody) or be modified to alter its glycosylation, again to alter one or more functional properties of the antibody. Such embodiments are described further below. The numbering of residues in the Fc region is that of the EU index of Kabat.

[0409] In one embodiment, the hinge region of CH1 is modified such that the number of cysteine residues in the hinge region is altered, e.g., increased or decreased. This approach is described further in U.S. Pat. No. 5,677,425 by Bodmer et al. The number of cysteine residues in the hinge region of CH1 is altered to, for example, facilitate assembly of the light and heavy chains or to increase or decrease the stability of the antibody.

[0410] In still another embodiment, the antibody can be modified to abrogate in vivo Fab arm exchange, in particular when IgG4 constant domains are used. Specifically, this process involves the exchange of IgG4 half-molecules (one heavy chain plus one light chain) between other IgG4 antibodies that effectively results in antibodies which are functionally monovalent. Mutations to the hinge region and constant domains of the heavy chain can abrogate this exchange (see Aalberse, R C, Schuurman J., 2002, Immunology 105:9-19). As outlined herein, a mutation that finds particular use in the present invention is the S241P in the context of an IgG4 constant domain. IgG4 finds use in the present invention as it has no significant effector function, and is thus used to block the receptor-ligand binding without cell depletion.

[0411] In some embodiments, amino acid substitutions can be made in the Fc region, in general for altering binding to FcγR receptors. By “Fc gamma receptor”, “FcγR” or “FcgammaR” as used herein is meant any member of the family of proteins that bind the IgG antibody Fc region and is encoded by an FcγR gene. In humans this family includes but is not limited to FcγRI (CD64), including isoforms FcγRIa, FcγRIb, and FcγRIc; FcγRII (CD32), including isoforms FcγRIIa (including allotypes H131 and R131), FcγRIIb (including FcγRIIb-1 and FcγRIIb-2), and FcγRIIc; and FcγRIII (CD16), including isoforms FcγRIIIa (including allotypes V158 and F158) and FcγRIIIb (including allotypes FcγRIIIb-NA1 and FcγRIIIb-NA2) (Jefferis et al., 2002, Immunol Lett 82:57-65, entirely incorporated by reference), as well as any undiscovered human FcγRs or FcγR isoforms or allotypes. An FcγR may be from any organism, including but not limited to humans, mice, rats, rabbits, and monkeys. Mouse FcγRs include but are not limited to FcγRI (CD64), FcγRII (CD32), FcγRIII-1 (CD16), and FcγRIII-2 (CD16-2), as well as any undiscovered mouse FcγRs or FcγR isoforms or allotypes.

[0412] There are a number of useful Fc substitutions that can be made to alter binding to one or more of the FcγR receptors. Substitutions that result in increased binding as well as decreased binding can be useful. For example, it is known that increased binding to FcγRIIIa generally results in increased ADCC (antibody dependent cell-mediated cytotoxicity; the cell-mediated reaction wherein nonspecific cytotoxic cells that express FcγRs recognize bound antibody on a target cell and subsequently cause lysis of the target cell. Similarly, decreased binding to FcγRIIb (an inhibitory receptor) can be beneficial as well in some circumstances. Amino acid substitutions that find use in the present invention include those listed in U.S. Ser. Nos. 11/124,620 (particularly FIG. 41) and U.S. Pat. No. 6,737,056, both of which are expressly incorporated herein by reference in their entirety and specifically for the variants disclosed therein.

[0413] In yet other embodiments, the Fc region is altered by replacing at least one amino acid residue with a different amino acid residue to alter the effector functions of the antibody. For example, one or more amino acids selected from amino acid residues 234, 235, 236, 237, 297, 318, 320 and 322 can be replaced with a different amino acid residue such that the antibody has an altered affinity for an effector ligand but retains the antigen-binding ability of the parent antibody. The effector ligand to which affinity is altered can be, for example, an Fc receptor or the C1 component of complement. This approach is described in further detail in U.S. Pat. Nos. 5,624,821 and 5,648,260, both by Winter et al.

[0414] In another example, one or more amino acids selected from amino acid residues 329, 331 and 322 can be replaced with a different amino acid residue such that the antibody has altered C1q binding and/or reduced or abolished complement dependent cytotoxicity (CDC). This approach is described in further detail in U.S. Pat. No. 6,194,551 by Idusogie et al.

[0415] In another example, one or more amino acid residues within amino acid positions 231 and 239 are altered to thereby alter the ability of the antibody to fix complement. This approach is described further in PCT Publication WO 94/29351 by Bodmer et al.

[0416] In yet another example, the Fc region is modified to increase the ability of the antibody to mediate antibody dependent cellular cytotoxicity (ADCC) and/or to increase the affinity of the antibody for an Fcγ receptor by modifying one or more amino acids at the following positions: 238, 239, 248, 249, 252, 254, 255, 256, 258, 265, 267, 268, 269, 270, 272, 276, 278, 280, 283, 285, 286, 289, 290, 292, 293, 294, 295, 296, 298, 301, 303, 305, 307, 309, 312, 315, 320, 322, 324, 326, 327, 329, 330, 331, 333, 334, 335, 337, 338, 340, 360, 373, 376, 378, 382, 388, 389, 398, 414, 416, 419, 430, 434, 435, 437, 438 or 439. This approach is described further in PCT Publication WO 00/42072 by Presta. Moreover, the binding sites on human IgG1 for FcγRI, FcγRII, FcγRIII and FcRn have been mapped and variants with improved binding have been described (see Shields, R. L. et al. (2001) J. Biol. Chem. 276:6591-6604). Specific mutations at positions 256, 290, 298, 333, 334 and 339 are shown to improve binding to FcyRIII. Additionally, the following combination mutants are shown to improve FcγRIII binding: T256A/S298A, S298A/E333A, S298A/K224A and S298A/E333A/K334A. Furthermore, mutations such as M252Y/S254T/T256E or M428L/N434S improve binding to FcRn and increase antibody circulation half-life (see Chan C A and Carter P J (2010) Nature Rev Immunol 10:301-316).

[0417] In addition, the antibodies of the invention are modified to increase its biological half-life. Various approaches are possible. For example, one or more of the following mutations can be introduced: T252L, T254S, T256F, as described in U.S. Pat. No. 6,277,375 to Ward. Alternatively, to increase the biological half-life, the antibody can be altered within the C_{H1} or C_{L} region to contain a salvage receptor binding epitope taken from two loops of a CH2 domain of an Fc region of an IgG, as described in U.S. Pat. Nos. 5,869,046 and 6,121,022 by Presta et al. Additional mutations to increase serum half-life are disclosed in U.S. Pat. Nos. 8,883,973, 6,737,056 and 7,371,826 and include 428L, 434A, 434S, and 428L/434S.

[0418] In still another embodiment, the glycosylation of an antibody is modified. For example, an aglycosylated antibody can be made (i.e., the antibody lacks glycosylation). Glycosylation can be altered to, for example, increase the affinity of the antibody for antigen or reduce effector function such as ADCC. Such carbohydrate modifications can be accomplished by, for example, altering one or more sites of glycosylation within the antibody sequence, for example N297. For example, one or more amino acid substitutions can be made that result in elimination of one or more variable region framework glycosylation sites to thereby eliminate glycosylation at that site, with an alanine replacement finding use in some embodiments.

[0419] Additionally or alternatively, an antibody can be made that has an altered type of glycosylation, such as a hypofucosylated antibody having reduced amounts of fucosyl residues or an antibody having increased bisecting GlcNac structures. Such altered glycosylation patterns have been demonstrated to increase the ADCC ability of antibodies. Such carbohydrate modifications can be accomplished by, for example, expressing the antibody in a host cell with altered glycosylation machinery. Cells with altered glycosylation machinery have been described in the art and can be used as host cells in which to express recombinant antibodies according to at least some embodiments of the invention to thereby produce an antibody with altered glycosylation. For example, the cell lines Ms704, Ms705, and Ms709 lack the fucosyltransferase gene, FUT8 (α(1,6) fucosyltransferase), such that antibodies expressed in the Ms704, Ms705, and Ms709 cell lines lack fucose on their carbohydrates. The Ms704, Ms705, and Ms709 FUT8 cell lines are created by the targeted disruption of the FUT8 gene in CHO/DG44 cells using two replacement vectors (see U.S. Patent Publication No. 20040110704 by Yamane et al. and Yamane-Ohnuki et al. (2004) Biotechnol Bioeng 87:614-22). As another example, EP 1,176,195 by Hanai et al. describes a cell line with a functionally disrupted FUT8 gene, which encodes a fucosyl transferase, such that antibodies expressed in such a cell line exhibit hypofucosylation by reducing or eliminating the α 1,6 bond-related enzyme. Hanai et al. also describe cell lines which have a low enzyme activity for adding fucose to the N-acetylglucosamine that binds to the Fc region of the antibody or does not have the enzyme activity, for example the rat myeloma cell line YB2/0 (ATCC CRL 1662). PCT Publication WO 03/035835 by Presta describes a variant CHO cell line, Lec13 cells, with reduced ability to attach fucose to Asn(297)-linked carbohydrates, also resulting in hypofucosylation of antibodies expressed in that host cell (see also Shields, R. L. et al. (2002) J. Biol. Chem. 277:26733-26740). PCT Publication WO 99/54342 by Umana et al. describes cell lines engineered to express glycoprotein-modifying glycosyl transferases (e.g., β(1,4)-N-acetylglucosaminyltransferase III (GnTIII)) such that antibodies expressed in the engineered cell lines exhibit increased bisecting GlcNac structures which results in increased ADCC activity of the antibodies (see also Umana et al. (1999) Nat. Biotech. 17:176-180). Alternatively, the fucose residues of the antibody may be cleaved off using a fucosidase enzyme. For example, the fucosidase α-L-fucosidase removes fucosyl residues from antibodies (Tarentino, A. L. et al. (1975) Biochem. 14:5516-23).

[0420] Another modification of the antibodies herein that is contemplated by the invention is PEGylation or the addition of other water soluble moieties, typically polymers, e.g., in order to enhance half-life. An antibody can be PEGylated to, for example, increase the biological (e.g., serum) half-life of the antibody. To PEGylate an antibody, the antibody, or fragment thereof, typically is reacted with polyethylene glycol (PEG), such as a reactive ester or aldehyde derivative of PEG, under conditions in which one or more PEG groups become attached to the antibody or antibody fragment. Preferably, the PEGylation is carried out via an acylation reaction or an alkylation reaction with a reactive PEG molecule (or an analogous reactive water-soluble polymer). As used herein, the term “polyethylene glycol” is intended to encompass any of the forms of PEG that have been used to derivatize other proteins, such as mono (C₁-C₁₀) alkoxy- or aryloxy-polyethylene glycol or polyethylene glycol-maleimide. In certain embodiments, the antibody to be PEGylated is an aglycosylated antibody. Methods for PEGylating proteins are known in the art and can be applied to the antibodies according to at least some embodiments of the invention. See for example, EP 0 154 316 by Nishimura et al. and EP 0 401 384 by Ishikawa et al.

[0421] In addition to substitutions made to alter binding affinity to FcγRs and/or FcRn and/or increase in vivo serum half-life, additional antibody modifications can be made, as described in further detail below.

[0422] In some cases, affinity maturation is done. Amino acid modifications in the CDRs are sometimes referred to as “affinity maturation”. An “affinity matured” antibody is one having one or more alteration(s) in one or more CDRs which results in an improvement in the affinity of the antibody for antigen, compared to a parent antibody which does not possess those alteration(s). In some cases, it may be desirable to decrease the affinity of an antibody to its antigen.

[0423] In some embodiments, one or more amino acid modifications are made in one or more of the CDRs of the antibodies of the invention. In general, only 1 or 2 or 3-amino acids are substituted in any single CDR, and generally no more than from 1, 2, 3. 4, 5, 6, 7, 8 9 or 10 changes are made within a set of CDRs. However, it should be appreciated that any combination of no substitutions, 1, 2 or 3 substitutions in any CDR can be independently and optionally combined with any other substitution.

[0424] Affinity maturation can be done to increase the binding affinity of the antibody for the antigen by at least about 10% to 50-100-150% or more, or from 1 to 5 fold as compared to the “parent” antibody. Preferred affinity matured antibodies will have nanomolar or even picomolar affinities for the antigen. Affinity matured antibodies are produced by known procedures. See, for example, Marks et al., 1992, Biotechnology 10:779-783 that describes affinity maturation by variable heavy chain (VH) and variable light chain (VL) domain shuffling. Random mutagenesis of CDR and/or framework residues is described in: Barbas, et al. 1994, Proc. Nat. Acad. Sci, USA 91:3809-3813; Shier et al., 1995, Gene 169:147-155; Yelton et al., 1995, J. Immunol. 155:1994-2004; Jackson et al., 1995, J. Immunol. 154(7):3310-9; and Hawkins et al, 1992, J. Mol. Biol. 226:889-896, for example.

[0425] Alternatively, amino acid modifications can be made in one or more of the CDRs of the antibodies of the invention that are “silent”, e.g. that do not significantly alter the affinity of the antibody for the antigen. These can be made for a number of reasons, including optimizing expression (as can be done for the nucleic acids encoding the antibodies of the invention).

[0426] Thus, included within the definition of the CDRs and antibodies of the invention are variant CDRs and antibodies; that is, the antibodies of the invention can include amino acid modifications in one or more of the CDRs of the enumerated antibodies of the invention. In addition, as outlined below, amino acid modifications can also independently and optionally be made in any region outside the CDRs, including framework and constant regions.

### VI. ANTI-TIGIT ANTIBODIES IN COMBINATION THERAPY

[0427] The TIGIT and PVRIG antibodies of the invention find particular use in the treatment of cancer when used in combination and for example with a checkpoint inhibitor such as an anti-PD-1 antibody, as described herein. In general, the antibodies of the invention are immunomodulatory, in that rather than directly attack cancerous cells, the anti-TIGIT and anti-PVRIG antibodies of the invention stimulate the immune system, generally by inhibiting the action of TIGIT and PVRIG, respectively. Thus, unlike tumor-targeted therapies, which are aimed at inhibiting molecular pathways that are crucial for tumor growth and development, and/or depleting tumor cells, cancer immunotherapy is aimed to stimulate the patient's own immune system to eliminate cancer cells, providing long-lived tumor destruction. Various approaches can be used in cancer immunotherapy, among them are therapeutic cancer vaccines to induce tumor-specific T cell responses, and immunostimulatory antibodies (i.e. antagonists of inhibitory receptors=immune checkpoints) to remove immunosuppressive pathways.

[0428] Clinical responses with targeted therapy or conventional anti-cancer therapies tend to be transient as cancer cells develop resistance, and tumor recurrence takes place. However, the clinical use of cancer immunotherapy in the past few years has shown that this type of therapy can have durable clinical responses, showing dramatic impact on long term survival. However, although responses are long term, only a small number of patients respond (as opposed to conventional or targeted therapy, where a large number of patients respond, but responses are transient).

[0429] By the time a tumor is detected clinically, it has already evaded the immune-defense system by acquiring immunoresistant and immunosuppressive properties and creating an immunosuppressive tumor microenvironment through various mechanisms and a variety of immune cells.

[0430] Accordingly, the anti-TIGIT and anti-PVRIG combinations of the invention are useful in treating cancer. Due to the nature of an immuno-oncology mechanism of action, TIGIT and or PVRIG do not necessarily need to be overexpressed on or correlated with a particular cancer type; that is, the goal is to have the anti-TIGIT antibodies de-suppress T cell and NK cell activation, such that the immune system will go after the cancers.

### VII. NUCLEIC ACID COMPOSITIONS

[0431] Nucleic acid compositions encoding the anti-TIGIT, anti-PVRIG and anti-PD-1 antibodies of the invention are also provided, as well as expression vectors containing the nucleic acids and host cells transformed with the nucleic acid and/or expression vector compositions. As will be appreciated by those in the art, the protein sequences depicted herein can be encoded by any number of possible nucleic acid sequences, due to the degeneracy of the genetic code.

[0432] The nucleic acid compositions that encode the antibodies will depend on the format of the antibody. For traditional, tetrameric antibodies containing two heavy chains and two light chains are encoded by two different nucleic acids, one encoding the heavy chain and one encoding the light chain. These can be put into a single expression vector or two expression vectors, as is known in the art, transformed into host cells, where they are expressed to form the antibodies of the invention. In some embodiments, for example when scFv constructs are used, a single nucleic acid encoding the variable heavy chain-linker-variable light chain is generally used, which can be inserted into an expression vector for transformation into host cells. The nucleic acids can be put into expression vectors that contain the appropriate transcriptional and translational control sequences, including, but not limited to, signal and secretion sequences, regulatory sequences, promoters, origins of replication, selection genes, etc.

[0433] Preferred mammalian host cells for expressing the recombinant antibodies according to at least some embodiments of the invention include Chinese Hamster Ovary (CHO cells), PER.C6, HEK293 and others as is known in the art.

[0434] The nucleic acids may be present in whole cells, in a cell lysate, or in a partially purified or substantially pure form. A nucleic acid is “isolated” or “rendered substantially pure” when purified away from other cellular components or other contaminants, e.g., other cellular nucleic acids or proteins, by standard techniques, including alkaline/SDS treatment, CsCl banding, column chromatography, agarose gel electrophoresis and others well known in the art.

[0435] To create a scFv gene, the V_{H}- and V_{L}-encoding DNA fragments are operatively linked to another fragment encoding a flexible linker, e.g., encoding the amino acid sequence (Gly4-Ser)3, such that the V_{H} and V_{L} sequences can be expressed as a contiguous single-chain protein, with the V_{L} and V_{H} regions joined by the flexible linker (see e.g., Bird et al. (1988) Science 242:423-426; Huston et al. (1988) Proc. Natl. Acad. Sci. USA 85:5879-5883; McCafferty et al., (1990) Nature 348:552-554).

### VIII. FORMULATIONS OF THE ANTIBODIES OF THE INVENTION

[0436] The therapeutic compositions used in the practice of the foregoing methods can be formulated into pharmaceutical compositions comprising a carrier suitable for the desired delivery method. Suitable carriers include any material that when combined with the therapeutic composition retains the anti-tumor function of the therapeutic composition and is generally non-reactive with the patient's immune system. Examples include, but are not limited to, any of a number of standard pharmaceutical carriers such as sterile phosphate buffered saline solutions, bacteriostatic water, and the like (see, generally, Remington's Pharmaceutical Sciences 16^{th} Edition, A. Osal., Ed., 1980). Acceptable carriers, excipients, or stabilizers are nontoxic to recipients at the dosages and concentrations employed and may include buffers.

[0437] In a preferred embodiment, the pharmaceutical composition that comprises the antibodies of the invention may be in a water-soluble form, such as being present as pharmaceutically acceptable salts, which is meant to include both acid and base addition salts. “Pharmaceutically acceptable acid addition salt” refers to those salts that retain the biological effectiveness of the free bases and that are not biologically or otherwise undesirable, formed with inorganic acids and the like. “Pharmaceutically acceptable base addition salts” include those derived from inorganic bases and the like.

[0438] Administration of the pharmaceutical composition comprising antibodies of the present invention, preferably in the form of a sterile aqueous solution, may be done in a variety of ways, including, but not limited to subcutaneously and intravenously.

[0439] The dosing amounts and frequencies of administration are, in a preferred embodiment, selected to be therapeutically or prophylactically effective. As is known in the art, adjustments for protein degradation, systemic versus localized delivery, and rate of new protease synthesis, as well as the age, body weight, general health, sex, diet, time of administration, drug interaction and the severity of the condition may be necessary, and will be ascertainable with routine experimentation by those skilled in the art.

[0440] In order to treat a patient, a therapeutically effective dose of the Fc variant of the present invention may be administered. By “therapeutically effective dose” herein is meant a dose that produces the effects for which it is administered. The exact dose will depend on the purpose of the treatment, and will be ascertainable by one skilled in the art using known techniques.

### A. Combination Formulations

[0441] The antibodies of the invention (either as a triple combination of anti-TIGIT, anti-PVRIG and anti-PD-1 antibodies or as a double combination of anti-TIGIT and anti-PVRIG antibodies) can be done in a variety of ways as those in the art will appreciate. In some cases, the antibodies are administered simultaneously, either as separate infusions (e.g. each IV bag holds a single antibody), for example, or as one infusion of a mixture of the antibodies. Alternatively, the antibodies can be administered sequentially, for example over a period of hours or days.

[0442] In some cases, the antibodies are provided in an administration kit, with dosage units of each antibody, again either packaged separately in individual dosage units, or together, as a mixture of antibodies as a single dosage unit.

### IX. COMBINATION THERAPIES AND USES

### A. Cancer Therapies

[0443] “Cancer,” as used herein, refers broadly to any neoplastic disease (whether invasive or metastatic) characterized by abnormal and uncontrolled cell division causing malignant growth or tumor (e.g., unregulated cell growth.) The term “cancer” or “cancerous” as used herein should be understood to encompass any neoplastic disease (whether invasive, non-invasive or metastatic) which is characterized by abnormal and uncontrolled cell division causing malignant growth or tumor, non-limiting examples of which are described herein. This includes any physiological condition in mammals that is typically characterized by unregulated cell growth. Examples of cancer are exemplified in the working examples and also are described within the specification.

[0444] Non-limiting examples of cancer that can be treated using anti-TIGIT antibodies, anit-PVRIG antibodies, as well as combinations of anti-TIGIT antibodies and other antibodies, such as any of the anti-TIGIT, anit-PVRIG, anti-PD-1 and/or anti-PD-L1 antibodies as provided herein. Such cancers include, but are not limited to, carcinoma, lymphoma, blastoma, sarcoma, and leukemia. More particular examples of such cancers include squamous cell cancer, lung cancer (including small-cell lung cancer, non-small cell lung cancer, adenocarcinoma of the lung, and squamous carcinoma of the lung), cancer of the peritoneum, hepatocellular cancer, gastric or stomach cancer (including gastrointestinal cancer), esophageal cancer, melanoma, mesothelioma, merkel cell cancer, pancreatic cancer, glioblastoma, cervical cancer, ovarian cancer, liver cancer, bladder cancer, hepatoma, breast cancer, colon cancer, colorectal cancer, endometrial or uterine carcinoma, salivary gland carcinoma, kidney or renal cancer, prostate cancer, vulval cancer, thyroid cancer, hepatic carcinoma and various types of head and neck cancer, larynx cancer, oral cavity cancer, urothelial cancer, KRAS mutant tumors, Myelodysplastic syndromes (MDS), as well as B-cell malignancies, B-cell lymphoma (including low grade/follicular non-Hodgkin's lymphoma (NHL); small lymphocytic (SL) NHL; intermediate grade/follicular NHL; intermediate grade diffuse NHL; high grade immunoblastic NHL; high grade lymphoblastic NHL; high grade small non-cleaved cell NHL; bulky disease NHL; mantle cell lymphoma; AIDS-related lymphoma; and Waldenstrom's Macroglobulinemia); chronic lymphocytic leukemia (CLL); acute lymphoblastic leukemia (ALL); Hairy cell leukemia; chronic myeloblastic leukemia; adult T-cell leukemia/lymphoma; myeloma; multiple myeloma and post-transplant lymphoproliferative disorder (PTLD), lymphoid malignancies, abnormal vascular proliferation associated with phakomatoses, edema (such as that associated with brain tumors), and Meigs' syndrome, rectal cancer, renal cell cancer, soft-tissue sarcoma, Kaposi's sarcoma, carcinoid carcinoma, ovarian early or advanced (including metastatic). The cancerous conditions amenable for treatment of the invention include cancers that express or do not express TIGIT, PVRIG, PVRL, PD-1, and/or PD-L1, and further include non-metastatic or non-invasive as well as invasive or metastatic cancers wherein TIGIT, PVRIG, PVRL, PD-1, and/or PD-L1, expression by immune, stromal or diseased cells suppress antitumor responses and anti-invasive immune responses. The method of the present invention is particularly suitable for the treatment of vascularized tumors. In some embodiments, the cancer is selected from the group consisting of prostate cancer, liver cancer (HCC), colorectal cancer, ovarian cancer, endometrial cancer, breast cancer, triple negative breast cancer, pancreatic cancer, stomach (gastric) cancer, cervical cancer, head and neck cancer, thyroid cancer, testis cancer, urothelial cancer, lung cancer (small cell lung, non-small cell lung), melanoma, non melanoma skin cancer (squamous and basal cell carcinoma), glioma, renal cancer (RCC), lymphoma (NHL or HL), Acute myeloid leukemia (AML), T cell Acute Lymphoblastic Leukemia (T-ALL), Diffuse Large B cell lymphoma, testicular germ cell tumors, mesothelioma, esophageal cancer, Merkel Cells cancer, MSI-high cancer, KRAS mutant tumors, adult T-cell leukemia/lymphoma, and Myelodysplastic syndromes (MDS). In some embodiments of the method, the cancer is selected from the group consisting of cancer triple negative breast cancer, stomach (gastric) cancer, lung cancer (small cell lung, non-small cell lung), Merkel Cells cancer, MSI-high cancer, KRAS mutant tumors, adult T-cell leukemia/lymphoma, and Myelodysplastic syndromes (MDS).

[0445] “Cancer therapy” herein refers to any method which prevents or treats cancer or ameliorates one or more of the symptoms of cancer. Typically, such therapies will comprises administration of immunostimulatory anti-TIGIT and anti-PVRIG antibodies (including antigen-binding fragments) in combination with chemotherapy or radiotherapy or other biologics and for enhancing the activity thereof, i.e., in individuals wherein expression of TIGIT and or PVRIG suppresses antitumor responses and the efficacy of chemotherapy or radiotherapy or biologic efficacy.

[0446] The present invention provides combination therapies and uses of anti-TIGIT antibodies and anti-PVRIG antibodies, sometimes with the addition of anti-PD-1 antibodies, for a triple combination therapy. The present invention provides combination therapies and uses of anti-TIGIT antibodies and anti-PVRIG antibodies, sometimes with the addition of anti-PD-L1 antibodies. Any of the PVRIG antibodies listed above or in the figures can employed for a triple combination therapy. Any of the TIGIT antibodies listed above or in the figures can be employed for a triple combination therapy. Any of the PD-1 antibodies listed above or in the figures can employed for a triple combination therapy. Any of the PD-L1 antibodies listed above or in the figures can employed for a triple combination therapy. In some embodiments, the anti-TIGIT antibody is an antibody chosen from any anti-TIGIT antibody described herein, including any of those described in FIG. 3. In some embodiments, the anti-PVRIG antibody is an antibody chosen from any anti-PVRIG antibody described herein, including any of those described in FIG. 5 and/or FIG. 63. In some embodiments, the anti-PD-1 antibody is an antibody chosen from any anti-PD-1 antibody described herein, including any of those described in FIG. 7.

[0447] In some embodiments, the anti-PD-1 antibody is selected from pembrolizumab (Keytruda®; MK-3475-033), nivolumab (Opdivo®; CheckMate078), cemplimab (REGN2810), SHR-1210 (CTR20160175 and CTR20170090), SHR-1210 (CTR20170299 and CTR20170322), JS-001 (CTR20160274), IBI308 (CTR20160735), BGB-A317 (CTR20160872) and/or a PD-1 antibody as recited in U.S. Patent Publication No. 2017/0081409.

[0448] In some embodiments, the anti-PD-L1 antibody is selected from antibody is one described in U.S. Patent Publication No. 2017/0281764 as well as International Patent Publication No. WO 2013/079174 (avelumab) and WO 2010/077634 (or U.S. Patent Application No. 20160222117 or U.S. Pat. No. 8,217,149; atezolizumab). In some embodiments, the PD-L1 antibody comprises a heavy chain sequence of SEQ ID NO: 34 and a light chain sequence of SEQ ID NO: 36 (from US 2017/281764). In some embodiments, the PD-L1 antibody is atezolizumab (TECENTRIQ®; MPDL3280A; IMpower110). In some embodiments, the PD-L1 antibody is avelumab (BAVENCIO®; MSB001071 8C). In some embodiments, the PD-L1 antibody is durvalumab (MEDI4736). In some embodiments, the PD-L1 antibody includes, for example, Atezolizumab (IMpower133), BMS-936559/MDX-1105, and/or RG-7446/MPDL3280A, and/or YW243.55.570, as well as any of those provided herein in FIG. 62.

[0449] In some embodiments, the anti-PVRIG antibody is selected from an antibody the sequences for which are shown in FIGS. 5 and/or 63:
[0450] CPA.7.001, CPA.7.001.VH, CPA.7.001.VL, CPA.7.001.HC, CPA.7.001.LC and CPA.7.001.H1, CPA.7.001.H2, CPA.7.001.H3, CPA.7.001.H4; CPA.7.001.vhCDR1, CPA.7.001.vhCDR2, CPA.7.001.vhCDR3, CPA.7.001.vlCDR1, CPA.7.001.vlCDR2, and CPA.7.001.vlCDR3;
[0451] CPA.7.003, CPA.7.003.VH, CPA.7.003.VL, CPA.7.003.HC, CPA.7.003.LC, CPA.7.003.H1, CPA.7.003.H2, CPA.7.003.H3, CPA.7.003.H4; CPA.7.003.vhCDR1, CPA.7.003.vhCDR2, CPA.7.003.vhCDR3, CPA.7.003.vlCDR1, CPA.7.003.vlCDR2, and CPA.7.003.vlCDR3;
[0452] CPA.7.004, CPA.7.004.VH, CPA.7.004.VL, CPA.7.004.HC, CPA.7.004.LC, CPA.7.004.H1, CPA.7.004.H2, CPA.7.004.H3 CPA.7.004.H4; CPA.7.004.vhCDR1, CPA.7.004.vhCDR2, CPA.7.004.vhCDR3, CPA.7.004.vlCDR1, CPA.7.004.vlCDR2, and CPA.7.004.vlCDR3;
[0453] CPA.7.006, CPA.7.006.VH, CPA.7.006.VL, CPA.7.006.HC, CPA.7.006.LC, CPA.7.006.H1, CPA.7.006.H2, CPA.7.006.H3 CPA.7.006.H4; CPA.7.006.vhCDR1, CPA.7.006.vhCDR2, CPA.7.006.vhCDR3, CPA.7.006.vlCDR1, CPA.7.006.vlCDR2, and CPA.7.006.vlCDR3;
[0454] CPA.7.008, CPA.7.008.VH, CPA.7.008.VL, CPA.7.008.HC, CPA.7.008.LC, CPA.7.008.H1, CPA.7.008.H2, CPA.7.008.H3 CPA.7.008.H4; CPA.7.008.vhCDR1, CPA.7.008.vhCDR2, CPA.7.008.vhCDR3, CPA.7.008.vlCDR1, CPA.7.008.vlCDR2, and CPA.7.008.vlCDR3;
[0455] CPA.7.009, CPA.7.009.VH, CPA.7.009.VL, CPA.7.009.HC, CPA.7.009.LC, CPA.7.009.H1, CPA.7.009.H2, CPA.7.009.H3 CPA.7.009.H4; CPA.7.009.vhCDR1, CPA.7.009.vhCDR2, CPA.7.009.vhCDR3, CPA.7.009.vlCDR1, CPA.7.009.vlCDR2, and CPA.7.009.vlCDR3;
[0456] CPA.7.010, CPA.7.010.VH, CPA.7.010.VL, CPA.7.010.HC, CPA.7.010.LC, CPA.7.010.H1, CPA.7.010.H2, CPA.7.010.H3 CPA.7.010.H4; CPA.7.010.vhCDR1, CPA.7.010.vhCDR2, CPA.7.010.vhCDR3, CPA.7.010.vlCDR1, CPA.7.010.v1CDR2, and CPA.7.010.v1CDR3;
[0457] CPA.7.011, CPA.7.011VH, CPA.7.011.VL, CPA.7.011.HC, CPA.7.011.LC, CPA.7.011.H1, CPA.7.011.H2, CPA.7.011.H3 CPA.7.011.H4; CPA.7.011.vhCDR1, CPA.7.011.vhCDR2, CPA.7.011.vhCDR3, CPA.7.011.vlCDR1, CPA.7.011.v1CDR2, and CPA.7.011.v1CDR3;
[0458] CPA.7.012, CPA.7.012.VH, CPA.7.012.VL, CPA.7.012.HC, CPA.7.012.LC, CPA.7.012.H1, CPA.7.012.H2, CPA.7.012.H3 CPA.7.012.H4; CPA.7.012.vhCDR1, CPA.7.012.vhCDR2, CPA.7.012.vhCDR3, CPA.7.012.vlCDR1, CPA.7.012.v1CDR2, and CPA.7.012.v1CDR3;
[0459] CPA.7.013, CPA.7.013.VH, CPA.7.013.VL, CPA.7.013.HC, CPA.7.013.LC, CPA.7.013.H1, CPA.7.013.H2, CPA.7.013.H3 CPA.7.013.H4; CPA.7.013.vhCDR1, CPA.7.013.vhCDR2, CPA.7.013.vhCDR3, CPA.7.013.vlCDR1, CPA.7.013.v1CDR2, and CPA.7.013.v1CDR3;
[0460] CPA.7.014, CPA.7.014.VH, CPA.7.014.VL, CPA.7.014.HC, CPA.7.014.LC, CPA.7.014.H1, CPA.7.014.H2, CPA.7.014.H3 CPA.7.014.H4; CPA.7.014.vhCDR1, CPA.7.014.vhCDR2, CPA.7.014.vhCDR3, CPA.7.014.vlCDR1, CPA.7.014.v1CDR2, and CPA.7.014.v1CDR3;
[0461] CPA.7.015, CPA.7.015.VH, CPA.7.015.VL, CPA.7.015.HC, CPA.7.015.LC, CPA.7.015.H1, CPA.7.015.H2, CPA.7.015.H3 CPA.7.015.H4; CPA.7.015.vhCDR1, CPA.7.015.vhCDR2, CPA.7.015.vhCDR3, CPA.7.015.vlCDR1, CPA.7.015.v1CDR2, and CPA.7.015.v1CDR3;
[0462] CPA.7.017, CPA.7.017.VH, CPA.7.017.VL, CPA.7.017.HC, CPA.7.017.LC, CPA.7.017H1, CPA.7.017.H2, CPA.7.017.H3 CPA.7.017.H4; CPA.7.017.vhCDR1, CPA.7.000171.vhCDR2, CPA.7.017.vhCDR3, CPA.7.017.vlCDR1, CPA.7.017.v1CDR2, and CPA.7.017.v1CDR3;
[0463] CPA.7.018, CPA.7.018.VH, CPA.7.018.VL, CPA.7.018.HC, CPA.7.018.LC, CPA.7.018.H1, CPA.7.018.H2, CPA.7.018.H3 CPA.7.018.H4; CPA.7.017.vhCDR1, CPA.7.017.vhCDR2, CPA.7.017.vhCDR3, CPA.7.017.vlCDR1, CPA.7.017.v1CDR2, and CPA.7.017.v1CDR3;
[0464] CPA.7.019, CPA.7.019.VH, CPA.7.019.VL, CPA.7.019.HC, CPA.7.019.LC, CPA.7.019.H1, CPA.7.019.H2, CPA.7.019.H3 CPA.7.019.H4; CPA.7.019.vhCDR1, CPA.7.019.vhCDR2, CPA.7.019.vhCDR3, CPA.7.019.vlCDR1, CPA.7.019.v1CDR2, and CPA.7.019.v1CDR3;
[0465] CPA.7.021, CPA.7.021 VH, CPA.7.021.VL, CPA.7.021.HC, CPA.7.021.LC, CPA.7.021.H1, CPA.7.021.H2, CPA.7.021.H3 CPA.7.021.H4; CPA.7.021.vhCDR1, CPA.7.021.vhCDR2, CPA.7.021.vhCDR3, CPA.7.021.vlCDR1, CPA.7.021.v1CDR2, and CPA.7.021.v1CDR3;
[0466] CPA.7.022, CPA.7.022.VH, CPA.7.022.VL, CPA.7.022.HC, CPA.7.022.LC, CPA.7.022.H1, CPA.7.022.H2, CPA.7.022.H3 CPA.7.022.H4; CPA.7.022.vhCDR1, CPA.7.022.vhCDR2, CPA.7.002201.vhCDR3, CPA.7.022.vlCDR1, CPA.7.022.v1CDR2, and CPA.7.022.v1CDR3;
[0467] CPA.7.023, CPA.7.023.VH, CPA.7.023.VL, CPA.7.023.HC, CPA.7.023.LC, CPA.7.023.H1, CPA.7.023.H2, CPA.7.023.H3 CPA.7.023.H4; CPA.7.023.vhCDR1, CPA.7.023.vhCDR2, CPA.7.023.vhCDR3, CPA.7.023.vlCDR1, CPA.7.023.v1CDR2, and CPA.7.023.v1CDR3;
[0468] CPA.7.024, CPA.7.024.VH, CPA.7.024.VL, CPA.7.024.HC, CPA.7.024.LC, CPA.7.024.H1, CPA.7.024.H2, CPA.7.024.H3 CPA.7.024.H4; CPA.7.024.vhCDR1, CPA.7.024.vhCDR2, CPA.7.024.vhCDR3, CPA.7.024.vlCDR1, CPA.7.024.v1CDR2, and CPA.7.024.v1CDR3;
[0469] CPA.7.033, CPA.7.033.VH, CPA.7.033.VL, CPA.7.033.HC, CPA.7.033.LC, CPA.7.033.H1, CPA.7.033.H2, CPA.7.033.H3 CPA.7.033.H4; CPA.7.033.vhCDR1, CPA.7.033.vhCDR2, CPA.7.033.vhCDR3, CPA.7.033.vlCDR1, CPA.7.033.v1CDR2, and CPA.7.033.v1CDR3;
[0470] CPA.7.034, CPA.7.034.VH, CPA.7.034.VL, CPA.7.034.HC, CPA.7.034.LC, CPA.7.034.H1, CPA.7.034.H2, CPA.7.034.H3 CPA.7.034.H4; CPA.7.034.vhCDR1, CPA.7.034.vhCDR2, CPA.7.034.vhCDR3, CPA.7.034.vlCDR1, CPA.7.034.v1CDR2, and CPA.7.034.v1CDR3;
[0471] CPA.7.036, CPA.7.036.VH, CPA.7.036.VL, CPA.7.036.HC, CPA.7.036.LC, CPA.7.036.H1, CPA.7.036.H2, CPA.7.036.H3 CPA.7.036.H4; CPA.7.036.vhCDR1, CPA.7.036.vhCDR2, CPA.7.036.vhCDR3, CPA.7.036.vlCDR1, CPA.7.036.v1CDR2, and CPA.7.036.v1CDR3;
[0472] CPA.7.040, CPA.7.040.VH, CPA.7.040.VL, CPA.7.040.HC, CPA.7.040.LC, CPA.7.040.H1, CPA.7.040.H2, CPA.7.040.H3 and CPA.7.040.H4; CPA.7.040.vhCDR1, CPA.7.040.vhCDR2, CPA.7.040.vhCDR3, CPA.7.040.vlCDR1, CPA.7.040.v1CDR2, and CPA.7.040.v1CDR3;
[0473] CPA.7.046, CPA.7.046.VH, CPA.7.046.VL, CPA.7.046.HC, CPA.7.046.LC, CPA.7.046.H1, CPA.7.046.H2, CPA.7.046.H3 CPA.7.046.H4; CPA.7.046.vhCDR1, CPA.7.046.vhCDR2, CPA.7.046.vhCDR3, CPA.7.046.vlCDR1, CPA.7.046.v1CDR2, and CPA.7.046.v1CDR3;
[0474] CPA.7.047, CPA.7.047.VH, CPA.7.047.VL, CPA.7.047.HC, CPA.7.047.LC, CPA.7.047.H1, CPA.7.047.H2, CPA.7.047.H3 CPA.7.047.H4; CPA.7.047.vhCDR1, CPA.7.047.vhCDR2, CPA.7.047.vhCDR3, CPA.7.047.vlCDR1, CPA.7.004701.v1CDR2, and CPA.7.047.v1CDR3;
[0475] CPA.7.049, CPA.7.049.VH, CPA.7.049.VL, CPA.7.049.HC, CPA.7.049.LC, CPA.7.049.H1, CPA.7.049.H2, CPA.7.049.H3 CPA.7.049.H4; CPA.7.049.vhCDR1, CPA.7.049.vhCDR2, CPA.7.049.vhCDR3, CPA.7.049.vlCDR1, CPA.7.049.v1CDR2, and CPA.7.049.v1CDR3; and
[0476] CPA.7.050, CPA.7.050.VH, CPA.7.050.VL, CPA.7.050.HC, CPA.7.050.LC, CPA.7.050.H1, CPA.7.050.H2, CPA.7.050.H3 CPA.7.050.H4, CPA.7.050.vhCDR1, CPA.7.050.vhCDR2, CPA.7.050.vhCDR3, CPA.7.050.vlCDR1, CPA.7.050.v1CDR2, and CPA.7.050.v1CDR3.
[0477] CPA.7.028, CPA.7.028.VH, CPA.7.028.VL, CPA.7.028.HC, CPA.7.028.LC, CPA.7.028.H1, CPA.7.028.H2, CPA.7.028.H3 and CPA.7.028.H4; CPA.7.028.vhCDR1, CPA.7.028.vhCDR2, CPA.7.028.vhCDR3, CPA.7.028.vlCDR1, CPA.7.028.v1CDR2, and CPA.7.028.v1CDR3.
[0478] CPA.7.030, CPA.7.030.VH, CPA.7.030.VL, CPA.7.030.HC, CPA.7.030.LC, CPA.7.030.H1, CPA.7.030.H2, CPA.7.030.H3 and CPA.7.030.H4; CPA.7.030.vhCDR1, CPA.7.030.vhCDR2, CPA.7.030.vhCDR3, CPA.7.030.vlCDR1, CPA.7.030.v1CDR2, and CPA.7.030.v1CDR3.
[0479] CPA.7.041, CPA.7.041 VH, CPA.7.041 VL, CPA.7.041.HC, CPA.7.041.LC, CPA.7.041.H1, CPA.7.041.H2, CPA.7.041.H3 and CPA.7.041.H4; CPA.7.041.vhCDR1, CPA.7.041.vhCDR2, CPA.7.041.vhCDR3, CPA.7.041.vlCDR1, CPA.7.041.v1CDR2, and CPA.7.041.v1CDR3.
[0480] CPA.7.016, CPA.7.016.VH, CPA.7.016.VL, CPA.7.016.HC, CPA.7.016.LC, CPA.7.016.H1, CPA.7.016.H2, CPA.7.016.H3 and CPA.7.016.H4; CPA.7.016.vhCDR1, CPA.7.016.vhCDR2, CPA.7.016.vhCDR3, CPA.7.016.vlCDR1, CPA.7.016.v1CDR2, and CPA.7.016.v1CDR3.
[0481] CPA.7.020, CPA.7.020.VH, CPA.7.020.VL, CPA.7.020.HC, CPA.7.020.LC, CPA.7.020.H1, CPA.7.020.H2, CPA.7.020.H3 and CPA.7.020.H4; CPA.7.020.vhCDR1, CPA.7.020.vhCDR2, CPA.7.020.vhCDR3, CPA.7.020.vlCDR1, CPA.7.020.v1CDR2, and CPA.7.020.v1CDR3.
[0482] CPA.7.038, CPA.7.038.VH, CPA.7.038.VL, CPA.7.038.HC, CPA.7.038.LC, CPA.7.038.H1, CPA.7.038.H2, CPA.7.038.H3 and CPA.7.038.H4; CPA.7.038.vhCDR1, CPA.7.038.vhCDR2, CPA.7.038.vhCDR3, CPA.7.038.vlCDR1, CPA.7.038.v1CDR2, and CPA.7.038.vlCDR3.
[0483] CPA.7.044, CPA.7.044.VH, CPA.7.044.VL, CPA.7.044.HC, CPA.7.044.LC, CPA.7.044.H1, CPA.7.044.H2, CPA.7.044.H3 and CPA.7.044.H4; CPA.7.044.vhCDR1, CPA.7.044.vhCDR2, CPA.7.044.vhCDR3, CPA.7.044.vlCDR1, CPA.7.044.v1CDR2, and CPA.7.044.v1CDR3.
[0484] CPA.7.045, CPA.7.045.VH, CPA.7.045.VL, CPA.7.045.HC, CPA.7.045.LC, CPA.7.045.H1, CPA.7.045.H2, CPA.7.045.H3 and CPA.7.045.H4; CPA.7.045.vhCDR1, CPA.7.045.vhCDR2, CPA.7.045.vhCDR3, CPA.7.045.vlCDR1, CPA.7.045.v1CDR2, and CPA.7.045.vlCDR3.
[0485] In some embodiments, the anti-TIGIT antibody is selected from an antibody the sequences for which are shown in FIG. 3.
[0486] CPA.9.018, CPA.9.018.VH, CPA.9.018.VL, CPA.9.018.HC, CPA.9.018.LC, CPA.9.018.H1, CPA.9.018.H2, CPA.9.018.H3, CPA.9.018.H4; CPA.9.018.H4(S241P); CPA.9.018.vhCDR1, CPA.9.018.vhCDR2, CPA.9.018.vhCDR3, CPA.9.018.vlCDR1, CPA.9.018.vlCDR2, CPA.9.018.vlCDR3 and scFv-CPA.9.018;
[0487] CPA.9.027, CPA.9.027.VH, CPA.9.027.VL, CPA.9.027.HC, CPA.9.027.LC, CPA.9.027.H1, CPA.9.027.H2, CPA.9.027.H3, CPA.9.027.H4; CPA.9.018.H4(S241P); CPA.9.027.vhCDR1, CPA.9.027.vhCDR2, CPA.9.027.vhCDR3, CPA.9.027.vlCDR1, CPA.9.027.vlCDR2, CPA.9.027.vlCDR3 and scFv-CPA.9.027;
[0488] CPA.9.049, CPA.9.049.VH, CPA.9.049.VL, CPA.9.049.HC, CPA.9.049.LC, CPA.9.049.H1, CPA.9.049.H2, CPA.9.049.H3; CPA.9.049.H4; CPA.9.049.H4(S241P); CPA.9.049.vhCDR1, CPA.9.049.vhCDR2, CPA.9.049.vhCDR3, CPA.9.049.vlCDR1, CPA.9.049.vlCDR2, CPA.9.049.vlCDR3 and scFv-CPA.9.049;
[0489] CPA.9.057, CPA.9.057.VH, CPA.9.057.VL, CPA.9.057.HC, CPA.9.057.LC, CPA.9.057.H1, CPA.9.057.H2, CPA.9.057.H3; CPA.9.057.H4; CPA.9.057.H4(S241P); CPA.9.057.vhCDR1, CPA.9.057.vhCDR2, CPA.9.057.vhCDR3, CPA.9.057.vlCDR1, CPA.9.057.vlCDR2, CPA.9.057.vlCDR3 and scFv-CPA.9.057;
[0490] CPA.9.059, CPA.9.059.VH, CPA.9.059.VL, CPA.9.059.HC, CPA.9.059.LC, CPA.9.059.H1, CPA.9.059.H2, CPA.9.059.H3; CPA.9.059.H4; CPA.9.059.H4(S241P); CPA.9.059.vhCDR1, CPA.9.059.vhCDR2, CPA.9.059.vhCDR3, CPA.9.059.vlCDR1, CPA.9.059.vlCDR2, CPA.9.059.vlCDR3 and scFv-CPA.9.059;
[0491] CPA.9.083, CPA.9.083.VH, CPA.9.083.VL, CPA.9.083.HC, CPA.9.083.LC, CPA.9.083.H1, CPA.9.083.H2, CPA.9.083.H3; CPA.9.083.H4; CPA.9.083.H4(S241P); CPA.9.083.vhCDR1, CPA.9.083.vhCDR2, CPA.9.083.vhCDR3, CPA.9.083.vlCDR1, CPA.9.083.vlCDR2, CPA.9.083.vlCDR3 and scFv-CPA.9.083;
[0492] CPA.9.086, CPA.9.086.VH, CPA.9.086.VL, CPA.9.086.HC, CPA.9.086.LC, CPA.9.086.H1, CPA.9.086.H2, CPA.9.086.H3; CPA.9.086.H4; CPA.9.086.H4(S241P); CPA.9.086.vhCDR1, CPA.9.086.vhCDR2, CPA.9.086.vhCDR3, CPA.9.086.vlCDR1, CPA.9.086.v1CDR2, CPA.9.086.v1CDR3 and scFv-CPA.9.086;
[0493] CPA.9.089, CPA.9.089.VH, CPA.9.089.VL, CPA.9.089.HC, CPA.9.089.LC, CPA.9.089.H1, CPA.9.089.H2, CPA.9.089.H3; CPA.9.089.H4; CPA.9.089.H4(S241P); CPA.9.089.vhCDR1, CPA.9.089.vhCDR2, CPA.9.089.vhCDR3, CPA.9.089.vlCDR1, CPA.9.089.v1CDR2, CPA.9.089.v1CDR3 and scFv-CPA.9.089;
[0494] CPA.9.093, CPA.9.093.VH, CPA.9.093.VL, CPA.9.093.HC, CPA.9.093.LC, CPA.9.093.H1, CPA.9.093.H2, CPA.9.093.H3; CPA.9.093.H4; CPA.9.093.H4(S241P); CPA.9.093.vhCDR1, CPA.9.093.vhCDR2, CPA.9.093.vhCDR3, CPA.9.093.vlCDR1, CPA.9.093.v1CDR2, CPA.9.093.v1CDR3 and scFv-CPA.9.093;
[0495] CPA.9.101, CPA.9.101.VH, CPA.9.101 VL, CPA.9.101.HC, CPA.9.101.LC, CPA.9.101.H1, CPA.9.101.H2, CPA.9.101.H3; CPA.9.101.H4; CPA.9.101.H4(S241P); CPA.9.101.vhCDR1, CPA.9.101.vhCDR2, CPA.9.101.vhCDR3, CPA.9.101.vlCDR1, CPA.9.101.v1CDR2, CPA.9.101.v1CDR3 and scFv-CPA.9.101; and
[0496] CPA.9.103, CPA.9.103.VH, CPA.9.103.VL, CPA.9.103.HC, CPA.9.103.LC, CPA.9.103.H1, CPA.9.103.H2, CPA.9.103.H3; CPA.9.103.H4; CPA.9.103.H4(S241P); CPA.9.103.vhCDR1, CPA.9.103.vhCDR2, CPA.9.103.vhCDR3, CPA.9.103.vlCDR1, CPA.9.103.v1CDR2, CPA.9.103.v1CDR3 and scFv-CPA.9.103.
[0497] CHA.9.536.1, CHA.9.536.1.VH, CHA.9.536.1.VL, CHA.9.536.1.HC, CHA.9.536.1.LC, CHA.9.536.1.H1, CHA.9.536.1.H2, CHA.9.536.1.H3; CHA.9.536.1.H4, CHA.9.536.1.H4(S241P), CHA.9.536.1.vhCDR1, CHA.9.536.1.vhCDR2, CHA.9.536.1.vhCDR3, CHA.9.536.1.vlCDR1, CHA.9.536.1.v1CDR2 and CHA.9.536.1.vhCDR3;
[0498] CHA.9.536.3, CHA.9.536.3.VH, CHA.9.536.3.VL, CHA.9.536.3.HC, CHA.9.536.3.LC, CHA.9.536.3.H1, CHA.9.536.3.H2, CHA.9.536.3.H3; CHA.9.536.3.H4, CHA.9.536.3.H4(S241P); CHA.9.536.3.vhCDR1, CHA.9.536.3.vhCDR2, CHA.9.536.3.vhCDR3, CHA.9.536.3.vlCDR1, CHA.9.536.3.v1CDR2 and CHA.9.536.3.vhCDR3;
[0499] CHA.9.536.4, CHA.9.536.4.VH, CHA.9.536.4.VL, CHA.9.536.4.HC, CHA.9.536.4.LC, CHA.9.536.4.H1, CHA.9.536.4.H2, CHA.9.536.4.H3; CHA.9.536.4.H4, CHA.9.536.4.H4(S241P), CHA.9.536.4.vhCDR1, CHA.9.536.4.vhCDR2, CHA.9.536.4.vhCDR3, CHA.9.536.4.vlCDR1, CHA.9.536.4.v1CDR2 and CHA.9.536.4.vhCDR3;
[0500] CHA.9.536.5, CHA.9.536.5.VH, CHA.9.536.5.VL, CHA.9.536.5.HC, CHA.9.536.5.LC, CHA.9.536.5.H1, CHA.9.536.5.H2, CHA.9.536.5.H3; CHA.9.536.5.H4, CHA.9.536.5.H4(S241P), CHA.9.536.5.vhCDR1, CHA.9.536.5.vhCDR2, CHA.9.536.5.vhCDR3, CHA.9.536.5.vlCDR1, CHA.9.536.5.v1CDR2 and CHA.9.536.5.vhCDR3;
[0501] CHA.9.536.6, CHA.9.536.6.VH, CHA.9.536.6.VL, CHA.9.536.6.HC, CHA.9.536.6.LC, CHA.9.536.6.H1, CHA.9.536.6.H2, CHA.9.536.6.H3; CHA.9.536.6.H4, CHA.9.536.6.vhCDR1, CHA.9.536.6.vhCDR2, CHA.9.536.6.vhCDR3, CHA.9.536.6.vlCDR1, CHA.9.536.6.v1CDR2 and CHA.9.536.6.vhCDR3;
[0502] CHA.9.536.7, CHA.9.536.7.VH, CHA.9.536.7.VL, CHA.9.536.7.HC, CHA.9.536.7.LC, CHA.9.536.7.H1, CHA.9.536.7.H2, CHA.9.536.7.H3; CHA.9.536.7.H4, CHA.9.536.5.H4(S241P); CHA.9.536.7.vhCDR1, CHA.9.536.7.vhCDR2, CHA.9.536.7.vhCDR3, CHA.9.536.7.vlCDR1, CHA.9.536.7.v1CDR2 and CHA.9.536.7.vhCDR3;
[0503] CHA.9.536.8, CHA.9.536.8.VH, CHA.9.536.8.VL, CHA.9.536.8.HC, CHA.9.536.8.LC, CHA.9.536.8.H1, CHA.9.536.8.H2, CHA.9.536.8.H3; CHA.9.536.8.H4, CHA.9.536.8.H4(S241P), CHA.9.536.8.vhCDR1, CHA.9.536.8.vhCDR2, CHA.9.536.8.vhCDR3, CHA.9.536.8.vlCDR1, CHA.9.536.8.v1CDR2 and CHA.9.536.8.vhCDR3;
[0504] CHA.9.560.1, CHA. 9.560.1VH, CHA. 9.560.1.VL, CHA. 9.560.1.HC, CHA. 9.560.1.LC, CHA. 9.560.1.H1, CHA. 9.560.1.H2, CHA. 9.560.1.H3; CHA. 9.560.1.H4, CHA. 9.560.1.H4(S241P), CHA. 9.560.1.vhCDR1, CHA. 9.560.1.vhCDR2, CHA. 9.560.1.vhCDR3, CHA. 9.560.1.vlCDR1, CHA. 9.560.1.v1CDR2 and CHA. 9.560.1.vhCDR3;
[0505] CHA.9.560.3, CHA. 9.560. 3VH, CHA. 9.560. 3.VL, CHA. 9.560. 3.HC, CHA. 9.560. 3.LC, CHA. 9.560. 3.H1, CHA. 9.560. 3.H2, CHA. 9.560. 3.H3; CHA.9.560.3.H4, CHA.9.560.3.H4(S241P); CHA. 9.560. 3.vhCDR1, CHA. 9.560. 3.vhCDR2, CHA. 9.560. 3.vhCDR3, CHA. 9.560. 3.vlCDR1, CHA. 9.560. 3.vlCDR2 and CHA. 9.560. 3.vhCDR3;
[0506] CHA.9.560.4, CHA. 9.560. 4VH, CHA. 9.560. 4.VL, CHA. 9.560. 4.HC, CHA. 9.560. 4.LC, CHA. 9.560. 4.H1, CHA. 9.560. 4.H2, CHA. 9.560. 4.H3; CHA.9.560.4.H4, CHA.9.560.4.H4(S241P), CHA. 9.560. 4.vhCDR1, CHA. 9.560. 4.vhCDR2, CHA. 9.560. 4.vhCDR3, CHA. 9.560. 4.vlCDR1, CHA. 9.560. 4.vlCDR2 and CHA. 9.560. 4.vhCDR3;
[0507] CHA.9.560.5, CHA. 9.560. 5VH, CHA. 9.560. 5.VL, CHA. 9.560. 5.HC, CHA. 9.560. 5.LC, CHA. 9.560. 5.H1, CHA. 9.560. 5.H2, CHA. 9.560. 5.H3; CHA. 9.560. 5.H4, CHA. 9.560. 5.vhCDR1, CHA. 9.560. 5.vhCDR2, CHA. 9.560. 5.vhCDR3, CHA. 9.560. 5.vlCDR1, CHA. 9.560. 5.vlCDR2 and CHA. 9.560. 5.vhCDR3;
[0508] CHA.9.560.6, CHA. 9.560. 6VH, CHA. 9.560. 6.VL, CHA. 9.560. 6.HC, CHA. 9.560. 6.LC, CHA. 9.560. 6.H1, CHA. 9.560. 6.H2, CHA. 9.560. 6.H3; CHA.9.560.6.H4, CHA.9.560.6.H4(S241P), CHA. 9.560. 6.vhCDR1, CHA. 9.560. 6.vhCDR2, CHA. 9.560. 6.vhCDR3, CHA. 9.560. 6.vlCDR1, CHA. 9.560. 6.vlCDR2 and CHA. 9.560. 6.vhCDR3;
[0509] CHA.9.560.7, CHA. 9.560. 7VH, CHA. 9.560. 7.VL, CHA. 9.560. 7.HC, CHA. 9.560. 7.LC, CHA. 9.560. 7.H1, CHA. 9.560. 7.H2, CHA. 9.560. 7.H3; CHA.9.560.7.H4;
[0510] CHA.9.560.7.H4(S241P); CHA. 9.560. 7.vhCDR1, CHA. 9.560. 7.vhCDR2, CHA. 9.560. 7.vhCDR3, CHA. 9.560. 7.vlCDR1, CHA. 9.560. 7.vlCDR2 and CHA. 9.560. 7.vhCDR3;
[0511] CHA.9.560.8, CHA. 9.560. 8VH, CHA. 9.560. 8.VL, CHA. 9.560. 8.HC, CHA. 9.560. 8.LC, CHA. 9.560. 8.H1, CHA. 9.560. 8.H2, CHA. 9.560. 8.H3; CHA.9.560.8.H4, CHA.9.560.8.H4(S241P); CHA. 9.560. 8.vhCDR1, CHA. 9.560. 8.vhCDR2, CHA. 9.560. 8.vhCDR3, CHA. 9.560. 8.vlCDR1, CHA. 9.560. 8.vlCDR2 and CHA. 9.560. 8.vhCDR3;
[0512] CHA.9.546.1, CHA. 9. 546.1VH, CHA. 9. 546.1.VL, CHA. 9. 546.1.HC, CHA. 9. 546.1.LC, CHA. 9. 546.1.H1, CHA. 9. 546.1.H2, CHA. 9. 546.1.H3; CHA.9.546.1.H4, CHA.9.546.1.H4(S241P), CHA. 9. 546.1.vhCDR1, CHA. 9. 546.1.vhCDR2, CHA. 9. 546.1.vhCDR3, CHA. 9. 546.1.vlCDR1, CHA. 9. 546.1.v1CDR2 and CHA. 9. 546.1.vhCDR3;
[0513] CHA.9.547.1, CHA. 9. 547.1VH, CHA. 9. 547.1VL, CHA. 9. 547.1.HC, CHA. 9. 547.1.LC, CHA. 9. 547.1.H1, CHA. 9. 547.1.H2, CHA. 9. 547.1.H3; CHA.9.547.1.H4, CHA.9.547.1.H4(S241P), CHA. 9. 547.1.vhCDR1, CHA. 9. 547.1.vhCDR2, CHA. 9. 547.1.vhCDR3, CHA. 9. 547.1.vlCDR1, CHA. 9. 547.1.v1CDR2 and CHA. 9. 547.1.vhCDR3;
[0514] CHA.9.547.2, CHA. 9. 547. 2VH, CHA. 9. 547. 2.VL, CHA. 9. 547. 2.HC, CHA. 9. 547. 2.LC, CHA. 9. 547. 2.H1, CHA. 9. 547. 2.H2, CHA. 9. 547. 2.H3; CHA.9.547.2.H4, CHA.9.547.2.H4(S241P), CHA. 9. 547. 2.vhCDR1, CHA. 9. 547. 2.vhCDR2, CHA. 9. 547. 2.vhCDR3, CHA. 9. 547. 2.vlCDR1, CHA. 9. 547. 2.vlCDR2 and CHA. 9. 547. 2.vhCDR3;
[0515] CHA.9.547.3, CHA. 9. 547. 3VH, CHA. 9. 547. 3.VL, CHA. 9. 547. 3.HC, CHA. 9. 547. 3.LC, CHA. 9. 547. 3.H1, CHA. 9. 547. 3.H2, CHA. 9. 547. 3.H3; CHA.9.547.3.H4, CHA.9.547.3.H4(S241P), CHA. 9. 547. 3.vhCDR1, CHA. 9.547. 3.vhCDR2, CHA. 9. 547. 3.vhCDR3, CHA. 9. 547. 3.vlCDR1, CHA. 9. 547. 3.vlCDR2 and CHA. 9. 547. 3.vhCDR3;
[0516] CHA.9.547.4, CHA. 9. 547. 4VH, CHA. 9. 547. 4.VL, CHA. 9. 547. 4.HC, CHA. 9.547. 4.LC, CHA. 9. 547. 4.H1, CHA. 9. 547. 4.H2, CHA. 9. 547. 4.H3; CHA.9.547.4.H4, CHA.9.547.4.H4(S241P), CHA. 9. 547. 4.vhCDR1, CHA. 9. 547. 4.vhCDR2, CHA. 9. 547. 4.vhCDR3, CHA. 9. 547. 4.vlCDR1, CHA. 9. 547. 4.vlCDR2 and CHA. 9. 547. 4.vhCDR3;
[0517] CHA.9.547.6, CHA. 9. 547. 6 VH, CHA. 9. 547. 6.VL, CHA. 9. 547. 6.HC, CHA. 9. 547. 6.LC, CHA. 9. 547. 6.H1, CHA. 9. 547. 6.H2, CHA. 9. 547. 6.H3; CHA.9.547.6.H4, CHA.9.547.6.H4(S241P), CHA. 9. 547. 6.vhCDR1, CHA. 9. 547. 6.vhCDR2, CHA. 9. 547. 6.vhCDR3, CHA. 9. 547. 6.vlCDR1, CHA. 9. 547. 6.vlCDR2 and CHA. 9. 547. 6.vhCDR3;
[0518] CHA.9.547.7, CHA. 9. 547. 7VH, CHA. 9. 547. 7.VL, CHA. 9. 547. 7.HC, CHA. 9. 547. 7.LC, CHA. 9. 547. 7.H1, CHA. 9. 547. 7.H2, CHA. 9. 547. 7.H3; CHA.9.547.7.H4, CHA.9.547.7.H4(S241P), CHA. 9. 547. 7.vhCDR1, CHA. 9. 547. 7.vhCDR2, CHA. 9. 547. 7.vhCDR3, CHA. 9. 547. 7.vlCDR1, CHA. 9. 547. 7.vlCDR2 and CHA. 9. 547. 7.vhCDR3;
[0519] CHA.9.547.8, CHA. 9. 547. 8VH, CHA. 9. 547. 8.VL, CHA. 9. 547. 8.HC, CHA.9.547.8.LC, CHA. 9. 547. 8.H1, CHA. 9. 547. 8.H2, CHA. 9. 547. 8.H3; CHA.9.547.8.H4, CHA.9.547.8.H4(S241P), CHA. 9. 547. 8.vhCDR1, CHA. 9. 547. 8.vhCDR2, CHA. 9. 547. 8.vhCDR3, CHA. 9. 547. 8.vlCDR1, CHA. 9. 547. 8.vlCDR2 and CHA. 9. 547. 8.vhCDR3;
[0520] CHA.9.547.9, CHA.9.547.9, CHA.9.547.9VH, CHA.9.547.9.VL, CHA.9. 547.9.HC, CHA.9.547.9.LC, CHA.9.547.9.H1, CHA.9.547.9.H2, CHA.9.547.9.H3; CHA.9.547.9.H4, CHA.9.547.9.H4, CHA.9.547.9.H4(S241P), CHA.9.547.9.H4(S241P), CHA.9.547.9.vhCDR1, CHA.9.547.9.vhCDR2, CHA.9.547.9.vhCDR3, CHA.9.547.9.vlCDR1, CHA.9.547.9.v1CDR2 and CHA.9.547.9.vhCDR3;
[0521] CHA.9.547.13, CHA.9.547.13, CHA.9.547. 13VH, CHA.9. 547.13.VL, CHA.9. 547.13.HC, CHA. 9.547.13.LC, CHA. 9.547.13.H1, CHA.9.547.13.H2, CHA.9. 547.13.H3;
[0522] CHA.9.547.13.H4, CHA.9.547.13.H4, CHA.9.547.13.H4(S241P), CHA.9.547.13.H4(S241P), CHA. 9. 547.13.vhCDR1, CHA.9.547.13.vhCDR2, CHA.9.547. 13.vhCDR3, CHA. 9. 547.13.vlCDR1, CHA. 9. 547.13.v1CDR2 and CHA. 9. 547. 13.vhCDR3;
[0523] CHA.9.541.1, CHA. 9. 541.1VH, CHA. 9. 541.1VL, CHA. 9. 541.1.HC, CHA. 9. 541.1.LC, CHA. 9. 541.1.H1, CHA. 9. 541.1.H2, CHA. 9. 541.1.H3; CHA.9.541.1.H4, CHA.9.541.1.H4(S241P), CHA. 9. 541.1.vhCDR1, CHA. 9. 541.1.vhCDR2, CHA. 9. 541.1.vhCDR3, CHA. 9. 541.1.vlCDR1, CHA. 9. 541.1.v1CDR2 and CHA. 9.541.1.vhCDR3;
[0524] CHA.9.541.3, CHA. 9. 541. 3.VH, CHA. 9. 541. 3.VL, CHA. 9. 541. 3.HC, CHA. 9. 541. 3.LC, CHA. 9. 541. 3.H1, CHA. 9. 541. 3.H2, CHA. 9. 541. 3.H3; CHA.9.541.3.H4, CHA.9.541.3.H4(S241P), CHA. 9. 541. 3.vhCDR1, CHA. 9. 541. 3.vhCDR2, CHA. 9. 541. 3.vhCDR3, CHA. 9. 541. 3.vlCDR1, CHA. 9. 541. 3.vlCDR2 and CHA. 9.541. 3.vhCDR3;
[0525] CHA.9.541.4, CHA. 9. 541.4.VH, CHA. 9. 541. 4.VL, CHA. 9. 541. 4.HC, CHA. 9. 541. 4.LC, CHA. 9. 541. 4.H1, CHA. 9. 541. 4.H2, CHA. 9. 541. 4.H3; CHA.9.541.4.H4, CHA.9.541.4.H4(S241P), CHA. 9. 541. 4.vhCDR1, CHA. 9. 541. 4.vhCDR2, CHA. 9. 541. 4.vhCDR3, CHA. 9. 541. 4.vlCDR1, CHA. 9. 541. 4.vlCDR2 and CHA. 9.541. 4.vhCDR3;
[0526] CHA.9.541.5, CHA. 9. 541. 5.VH, CHA. 9. 541. 5.VL, CHA. 9. 541. 5.HC, CHA. 9. 541. 5.LC, CHA. 9. 541. 5.H1, CHA. 9. 541. 5.H2, CHA. 9. 541. 5.H3; CHA.9.541.5.H4, CHA.9.541.5.H4(S241P), CHA. 9. 541. 5.vhCDR1, CHA. 9. 541. 5.vhCDR2, CHA. 9. 541. 5.vhCDR3, CHA. 9. 541. 5.vlCDR1, CHA. 9. 541. 5.vlCDR2 and CHA. 9.541. 5.vhCDR3;
[0527] CHA.9.541.6, CHA. 9. 541. 6.VH, CHA. 9. 541. 6.VL, CHA. 9. 541. 6.HC, CHA. 9. 541. 6.LC, CHA. 9. 541. 6.H1, CHA. 9. 541. 6.H2, CHA. 9. 541.6.H3; CHA.9.541.6.H4, CHA.9.541.6.H4(S241P), CHA. 9. 541. 6.vhCDR1, CHA. 9. 541. 6.vhCDR2, CHA. 9. 541. 6.vhCDR3, CHA. 9. 541. 6.vlCDR1, CHA. 9. 541. 6.vlCDR2 and CHA. 9.541. 6.vhCDR3;
[0528] CHA.9.541.7, CHA. 9. 541. 7.VH, CHA. 9. 541. 7.VL, CHA. 9. 541. 7.HC, CHA. 9. 541. 7.LC, CHA. 9. 541. 7.H1, CHA. 9. 541. 7.H2, CHA. 9. 541. 7.H3; CHA.9.541.7.H4, CHA.9.541.7.H4(S241P), CHA. 9. 541. 7.vhCDR1, CHA. 9. 541. 7.vhCDR2, CHA. 9. 541. 7.vhCDR3, CHA. 9. 541. 7.vlCDR1, CHA. 9. 541. 7.vlCDR2 and CHA. 9.541. 7.vhCDR3; and
[0529] CHA.9.541.8, CHA. 9. 541. 8.VH, CHA. 9. 541. 8.VL, CHA. 9. 541. 8.HC, CHA. 9. 541. 8.LC, CHA. 9. 541. 8.H1, CHA. 9. 541. 8.H2, CHA. 9. 541. 8.H3; CHA.9.541.8.H4, CHA.9.541.8.H4(S241P); CHA. 9. 541. 8vhCDR1, CHA. 9. 541. 8.vhCDR2, CHA. 9. 541. 8.vhCDR3, CHA. 9. 541. 8.vlCDR1, CHA. 9. 541. 8.vlCDR2 and CHA. 9.541. 8.vhCDR3.

[0530] In some embodiments, the anti-TIGIT antibody is CPA.9.083.H4(S241P), the anti-PD-1 antibody is pembrolizumab, and the anti-PVRIG antibody is one of the above and/or from FIG. 5 or 63.

[0531] In some embodiments, the anti-TIGIT antibody is CPA.9.086.H4(S241P), the anti-PD-1 antibody is pembrolizumab, and the anti-PVRIG antibody is one of the above and/or from FIG. 5 or 63.

[0532] In some embodiments, the anti-TIGIT antibody is CHA.9.547.7.H4(S241P), the anti-PD-1 antibody is pembrolizumab, and the anti-PVRIG antibody is one of the above and/or from FIG. 5 or 63.

[0533] In some embodiments, the anti-TIGIT antibody is CHA.9.547.13.H4(S241P), the anti-PD-1 antibody is pembrolizumab, and the anti-PVRIG antibody is one of the above and/or from FIG. 5 or 63.

[0534] In some embodiments, the anti-TIGIT antibody is CPA.9.083.H4(S241P), the anti-PD-1 antibody is nivolumab, and the anti-PVRIG antibody is one of the above and/or from FIG. 5 or 63.

[0535] In some embodiments, the anti-TIGIT antibody is CPA.9.086.H4(S241P), the anti-PD-1 antibody is nivolumab, and the anti-PVRIG antibody is one of the above and/or from FIG. 5 or 63.

[0536] In some embodiments, the anti-TIGIT antibody is CHA.9.547.7.H4(S241P), the anti-PD-1 antibody is nivolumab, and the anti-PVRIG antibody is one of the above and/or from FIG. 5 or 63.

[0537] In some embodiments, the anti-TIGIT antibody is CHA.9.547.13.H4(S241P), the PD-1 antibody is nivolumab, and the anti-PVRIG antibody is one of the above and/or from FIG. 5 or 63.

[0538] In some embodiments, the anti-TIGIT antibody is CPA.9.083.H4(S241P), the anti-PD-1 antibody is cemiplimab, and the anti-PVRIG antibody is one of the above and/or from FIG. 5 or 63.

[0539] In some embodiments, the anti-TIGIT antibody is CPA.9.086.H4(S241P), the anti-PD-1 antibody is cemiplimab, and the anti-PVRIG antibody is one of the above and/or from FIG. 5 or 63.

[0540] In some embodiments, the anti-TIGIT antibody is CHA.9.547.7.H4(S241P), the anti-PD-1 antibody is cemiplimab, and the anti-PVRIG antibody is one of the above and/or from FIG. 5 or 63.

[0541] In some embodiments, the anti-TIGIT antibody is CHA.9.547.13.H4(S241P), the PD-1 antibody is cemiplimab, and the anti-PVRIG antibody is one of the above and/or from FIG. 5 or 63.

[0542] In some embodiments, the anti-PVRIG antibody is CHA.7.518.1.H4(S241P), the anti-PD-1 antibody is pembrolizumab, and the anti-TIGIT antibody one of the above and/or from FIG. 3.

[0543] In some embodiments, the anti-PVRIG antibody is CHA.7.538.1.2.H4(S241P), the anti-PD-1 antibody is pembrolizumab, and the anti-TIGIT antibody one of the above and/or from FIG. 3.

[0544] In some embodiments, the anti-PVRIG antibody is CHA.7.518.1.H4(S241P), the anti-PD-1 antibody is nivolumab, and the anti-TIGIT antibody one of the above and/or from FIG. 3.

[0545] In some embodiments, the anti-PVRIG antibody is CHA.7.538.1.2.H4(S241P), the anti-PD-1 antibody is nivolumab, and the anti-TIGIT antibody one of the above and/or from FIG. 3.

[0546] In some embodiments, the anti-PVRIG antibody is CHA.7.518.1.H4(S241P), the anti-PD-1 antibody is cemiplimab, and the anti-TIGIT antibody one of the above and/or from FIG. 3.

[0547] In some embodiments, the anti-PVRIG antibody is CHA.7.538.1.2.H4(S241P), the anti-PD-1 antibody is cemiplimab, and the anti-TIGIT antibody one of the above and/or from FIG. 3.

[0548] In some embodiments, the anti-TIGIT antibody is CPA.9.083.H4(S241P), the anti-PVRIG antibody is CHA.7.538.1.2.H4(S241P), and the anti-PD-1 antibody is pembrolizumab.

[0549] In some embodiments, the anti-TIGIT antibody is CPA.9.083.H4(S241P), the anti-PVRIG antibody is CHA.7.518.1.H4(S241P), and the anti-PD-1 antibody is pembrolizumab.

[0550] In some embodiments, the anti-TIGIT antibody is CPA.9.086.H4(S241P), the anti-PVRIG antibody is CHA.7.538.1.2.H4(S241P), and the anti-PD-1 antibody is pembrolizumab.

[0551] In some embodiments, the anti-TIGIT antibody is CPA.9.086.H4(S241P), the anti-PVRIG antibody is CHA.7.518.1.H4(S241P), and the anti-PD-1 antibody is pembrolizumab.

[0552] In some embodiments, the anti-TIGIT antibody is CHA.9.547.7.H4(S241P), the anti-PVRIG antibody is CHA.7.538.1.2.H4(S241P), and the anti-PD-1 antibody is pembrolizumab.

[0553] In some embodiments, the anti-TIGIT antibody is CHA.9.547.7.H4(S241P), the anti-PVRIG antibody is CHA.7.518.1.H4(S241P), and the anti-PD-1 antibody is pembrolizumab.

[0554] In some embodiments, the anti-TIGIT antibody is CHA.9.547.13.H4(S241P), the anti-PVRIG antibody is CHA.7.538.1.2.H4(S241P), and the anti-PD-1 antibody is pembrolizumab.

[0555] In some embodiments, the anti-TIGIT antibody is CHA.9.547.13.H4(S241P), the anti-PVRIG antibody is CHA.7.518.1.H4(S241P), and the anti-PD-1 antibody is pembrolizumab.

[0556] In some embodiments, the anti-TIGIT antibody is CPA.9.083.H4(S241P), the anti-PVRIG antibody is CHA.7.538.1.2.H4(S241P), and the anti-PD-1 antibody is SHR-1210.

[0557] In some embodiments, the anti-TIGIT antibody is CPA.9.083.H4(S241P), the anti-PVRIG antibody is CHA.7.518.1.H4(S241P), and the anti-PD-1 antibody is SHR-1210.

[0558] In some embodiments, the anti-TIGIT antibody is CPA.9.086.H4(S241P), the anti-PVRIG antibody is CHA.7.538.1.2.H4(S241P), and the anti-PD-1 antibody is SHR-1210.

[0559] In some embodiments, the anti-TIGIT antibody is CPA.9.086.H4(S241P), the anti-PVRIG antibody is CHA.7.518.1.H4(S241P), and the anti-PD-1 antibody is SHR-1210.

[0560] In some embodiments, the anti-TIGIT antibody is CHA.9.547.7.H4(S241P), the anti-PVRIG antibody is CHA.7.538.1.2.H4(S241P), and the anti-PD-1 antibody is SHR-1210.

[0561] In some embodiments, the anti-TIGIT antibody is CHA.9.547.7.H4(S241P), the anti-PVRIG antibody is CHA.7.518.1.H4(S241P), and the anti-PD-1 antibody is SHR-1210.

[0562] In some embodiments, the anti-TIGIT antibody is CHA.9.547.13.H4(S241P), the anti-PVRIG antibody is CHA.7.538.1.2.H4(S241P), and the anti-PD-1 antibody is SHR-1210.

[0563] In some embodiments, the anti-TIGIT antibody is CHA.9.547.13.H4(S241P), the anti-PVRIG antibody is CHA.7.518.1.H4(S241P), and the anti-PD-1 antibody is SHR-1210.

[0564] In some embodiments, the anti-TIGIT antibody is CPA.9.083.H4(S241P), the anti-PVRIG antibody is CHA.7.538.1.2.H4(S241P), and the anti-PD-1 antibody is IBI308.

[0565] In some embodiments, the anti-TIGIT antibody is CPA.9.083.H4(S241P), the anti-PVRIG antibody is CHA.7.518.1.H4(S241P), and the anti-PD-1 antibody is IBI308.

[0566] In some embodiments, the anti-TIGIT antibody is CPA.9.086.H4(S241P), the anti-PVRIG antibody is CHA.7.538.1.2.H4(S241P), and the anti-PD-1 antibody is IBI308.

[0567] In some embodiments, the anti-TIGIT antibody is CPA.9.086.H4(S241P), the anti-PVRIG antibody is CHA.7.518.1.H4(S241P), and the anti-PD-1 antibody is IBI308.

[0568] In some embodiments, the anti-TIGIT antibody is CHA.9.547.7.H4(S241P), the anti-PVRIG antibody is CHA.7.538.1.2.H4(S241P), and the anti-PD-1 antibody is IBI1308.

[0569] In some embodiments, the anti-TIGIT antibody is CHA.9.547.7.H4(S241P), the anti-PVRIG antibody is CHA.7.518.1.H4(S241P), and the anti-PD-1 antibody is IBI308.

[0570] In some embodiments, the anti-TIGIT antibody is CHA.9.547.13.H4(S241P), the anti-PVRIG antibody is CHA.7.538.1.2.H4(S241P), and the anti-PD-1 antibody is IBI1308.

[0571] In some embodiments, the anti-TIGIT antibody is CHA.9.547.13.H4(S241P), the anti-PVRIG antibody is CHA.7.518.1.H4(S241P), and the anti-PD-1 antibody is IBI308.

[0572] In some embodiments, the anti-TIGIT antibody is CPA.9.083.H4(S241P), the anti-PVRIG antibody is CHA.7.538.1.2.H4(S241P), and the anti-PD-1 antibody is BGB-A317.

[0573] In some embodiments, the anti-TIGIT antibody is CPA.9.083.H4(S241P), the anti-PVRIG antibody is CHA.7.518.1.H4(S241P), and the anti-PD-1 antibody is BGB-A317.

[0574] In some embodiments, the anti-TIGIT antibody is CPA.9.086.H4(S241P), the anti-PVRIG antibody is CHA.7.538.1.2.H4(S241P), and the anti-PD-1 antibody is BGB-A317.

[0575] In some embodiments, the anti-TIGIT antibody is CPA.9.086.H4(S241P), the anti-PVRIG antibody is CHA.7.518.1.H4(S241P), and the anti-PD-1 antibody is BGB-A317.

[0576] In some embodiments, the anti-TIGIT antibody is CHA.9.547.7.H4(S241P), the anti-PVRIG antibody is CHA.7.538.1.2.H4(S241P), and the anti-PD-1 antibody is BGB-A317.

[0577] In some embodiments, the anti-TIGIT antibody is CHA.9.547.7.H4(S241P), the anti-PVRIG antibody is CHA.7.518.1.H4(S241P), and the anti-PD-1 antibody is BGB-A317.

[0578] In some embodiments, the anti-TIGIT antibody is CHA.9.547.13.H4(S241P), the anti-PVRIG antibody is CHA.7.538.1.2.H4(S241P), and the anti-PD-1 antibody is BGB-A317.

[0579] In some embodiments, the anti-TIGIT antibody is CHA.9.547.13.H4(S241P), the anti-PVRIG antibody is CHA.7.518.1.H4(S241P), and the anti-PD-1 antibody is BGB-A317.

[0580] In some embodiments, the anti-TIGIT antibody is CPA.9.083.H4(S241P), the anti-PVRIG antibody is CHA.7.538.1.2.H4(S241P), and the anti-PD-1 antibody is an anti-PD-1 antibody as recited in U.S. Patent Publication No. 2017/0081409.

[0581] In some embodiments, the anti-TIGIT antibody is CPA.9.083.H4(S241P), the anti-PVRIG antibody is CHA.7.518.1.H4(S241P), and the anti-PD-1 antibody is an anti-PD-1 antibody as recited in U.S. Patent Publication No. 2017/0081409.

[0582] In some embodiments, the anti-TIGIT antibody is CPA.9.086.H4(S241P), the anti-PVRIG antibody is CHA.7.538.1.2.H4(S241P), and the anti-PD-1 antibody is an anti-PD-1 antibody as recited in U.S. Patent Publication No. 2017/0081409.

[0583] In some embodiments, the anti-TIGIT antibody is CPA.9.086.H4(S241P), the anti-PVRIG antibody is CHA.7.518.1.H4(S241P), and the anti-PD-1 antibody is an anti-PD-1 antibody as recited in U.S. Patent Publication No. 2017/0081409.

[0584] In some embodiments, the anti-TIGIT antibody is CHA.9.547.7.H4(S241P), the anti-PVRIG antibody is CHA.7.538.1.2.H4(S241P), and the anti-PD-1 antibody is an anti-PD-1 antibody as recited in U.S. Patent Publication No. 2017/0081409.

[0585] In some embodiments, the anti-TIGIT antibody is CHA.9.547.7.H4(S241P), the anti-PVRIG antibody is CHA.7.518.1.H4(S241P), and the anti-PD-1 antibody is an anti-PD-1 antibody as recited in U.S. Patent Publication No. 2017/0081409.

[0586] In some embodiments, the anti-TIGIT antibody is CHA.9.547.13.H4(S241P), the anti-PVRIG antibody is CHA.7.538.1.2.H4(S241P), and the anti-PD-1 antibody is an anti-PD-1 antibody as recited in U.S. Patent Publication No. 2017/0081409.

[0587] In some embodiments, the anti-TIGIT antibody is CHA.9.547.13.H4(S241P), the anti-PVRIG antibody is CHA.7.518.1.H4(S241P), and the anti-PD-1 antibody is an anti-PD-1 antibody as recited in U.S. Patent Publication No. 2017/0081409.

[0588] In some embodiments, the anti-TIGIT antibody is CPA.9.083.H4(S241P), the anti-PVRIG antibody is CHA.7.538.1.2.H4(S241P), and the anti-PD-1 antibody is cemiplimab.

[0589] In some embodiments, the anti-TIGIT antibody is CPA.9.083.H4(S241P), the anti-PVRIG antibody is CHA.7.518.1.H4(S241P), and the anti-PD-1 antibody is cemiplimab.

[0590] In some embodiments, the anti-TIGIT antibody is CPA.9.086.H4(S241P), the anti-PVRIG antibody is CHA.7.538.1.2.H4(S241P), and the anti-PD-1 antibody is cemiplimab.

[0591] In some embodiments, the anti-TIGIT antibody is CPA.9.086.H4(S241P), the anti-PVRIG antibody is CHA.7.518.1.H4(S241P), and the anti-PD-1 antibody is cemiplimab.

[0592] In some embodiments, the anti-TIGIT antibody is CHA.9.547.7.H4(S241P), the anti-PVRIG antibody is CHA.7.538.1.2.H4(S241P), and the anti-PD-1 antibody is cemiplimab.

[0593] In some embodiments, the anti-TIGIT antibody is CHA.9.547.7.H4(S241P), the anti-PVRIG antibody is CHA.7.518.1.H4(S241P), and the anti-PD-1 antibody is cemiplimab.

[0594] In some embodiments, the anti-TIGIT antibody is CHA.9.547.13.H4(S241P), the anti-PVRIG antibody is CHA.7.538.1.2.H4(S241P), and the anti-PD-1 antibody is cemiplimab.

[0595] In some embodiments, the anti-TIGIT antibody is CHA.9.547.13.H4(S241P), the anti-PVRIG antibody is CHA.7.518.1.H4(S241P), and the anti-PD-1 antibody is cemiplimab.

[0596] In some embodiments, the anti-TIGIT antibody is CPA.9.083.H4(S241P), the anti-PD-L1 antibody is atezolizumab, and the anti-PVRIG antibody is one of the above and/or from FIG. 5 or 63.

[0597] In some embodiments, the anti-TIGIT antibody is CPA.9.086.H4(S241P the anti-PD-L1 antibody is atezolizumab, and the anti-PVRIG antibody is one of the above and/or from FIG. 5 or 63.

[0598] In some embodiments, the anti-TIGIT antibody is CHA.9.547.7.H4(S241P), the anti-PD-L1 antibody is atezolizumab, and the anti-PVRIG antibody is one of the above and/or from FIG. 5 or 63.

[0599] In some embodiments, the anti-TIGIT antibody is CHA.9.547.13.H4(S241P), the anti-PD-L1 antibody is atezolizumab, and the anti-PVRIG antibody is one of the above and/or from FIG. 5 or 63.

[0600] In some embodiments, the anti-TIGIT antibody is CPA.9.083.H4(S241P), the anti-PD-L1 antibody is avelumab, and the anti-PVRIG antibody is one of the above and/or from FIG. 5 or 63.

[0601] In some embodiments, the anti-TIGIT antibody is CPA.9.086.H4(S241P), the anti-PD-L1 antibody is avelumab, and the anti-PVRIG antibody is one of the above and/or from FIG. 5 or 63.

[0602] In some embodiments, the anti-TIGIT antibody is CHA.9.547.7.H4(S241P), the anti-PD-L1 antibody is avelumab, and the anti-PVRIG antibody is one of the above and/or from FIG. 5 or 63.

[0603] In some embodiments, the anti-TIGIT antibody is CHA.9.547.13.H4(S241P the anti-PD-L1 antibody is avelumab, and the anti-PVRIG antibody is one of the above and/or from FIG. 5 or 63.

[0604] In some embodiments, the anti-TIGIT antibody is CPA.9.083.H4(S241P), the anti-PD-L1 antibody is durvalumab, and the anti-PVRIG antibody is one of the above and/or from FIG. 5 or 63.

[0605] In some embodiments, the anti-TIGIT antibody is CPA.9.086.H4(S241P the anti-PD-L1 antibody is durvalumab, and the anti-PVRIG antibody is one of the above and/or from FIG. 5 or 63.

[0606] In some embodiments, the anti-TIGIT antibody is CHA.9.547.7.H4(S241P), the anti-PD-L1 antibody is durvalumab, and the anti-PVRIG antibody is one of the above and/or from FIG. 5 or 63.

[0607] In some embodiments, the anti-TIGIT antibody is CHA.9.547.13.H4(S241P), the anti-PD-L1 antibody is durvalumab, and the anti-PVRIG antibody is one of the above and/or from FIG. 5 or 63.

[0608] In some embodiments, the anti-PVRIG antibody is CHA.7.518.1.H4(S241P), the anti-PD-L1 antibody is atezolizumab, and the anti-TIGIT antibody one of the above and/or from FIG. 3.

[0609] In some embodiments, the anti-PVRIG antibody is CHA.7.538.1.2.H4(S241P), the anti-PD-L1 antibody is atezolizumab, and the anti-TIGIT antibody one of the above and/or from FIG. 3.

[0610] In some embodiments, the anti-PVRIG antibody is CHA.7.518.1.H4(S241P), the anti-PD-L1 antibody is atezolizumab, and the anti-TIGIT antibody one of the above and/or from FIG. 3.

[0611] In some embodiments, the anti-PVRIG antibody is CHA.7.538.1.2.H4(S241P), the anti-PD-L1 antibody is atezolizumab, and the anti-TIGIT antibody one of the above and/or from FIG. 3.

[0612] In some embodiments, the anti-PVRIG antibody is CHA.7.518.1.H4(S241P), the anti-PD-L1 antibody is avelumab, and the anti-TIGIT antibody one of the above and/or from FIG. 3.

[0613] In some embodiments, the anti-PVRIG antibody is CHA.7.538.1.2.H4(S241P), the anti-PD-L1 antibody is avelumab, and the anti-TIGIT antibody one of the above and/or from FIG. 3.

[0614] In some embodiments, the anti-PVRIG antibody is CHA.7.518.1.H4(S241P), the anti-PD-L1 antibody is avelumab, and the anti-TIGIT antibody one of the above and/or from FIG. 3.

[0615] In some embodiments, the anti-PVRIG antibody is CHA.7.538.1.2.H4(S241P), the anti-PD-L1 antibody is avelumab, and the anti-TIGIT antibody one of the above and/or from FIG. 3.

[0616] In some embodiments, the anti-PVRIG antibody is CHA.7.518.1.H4(S241P), the anti-PD-L1 antibody is durvalumab, and the anti-TIGIT antibody one of the above and/or from FIG. 3.

[0617] In some embodiments, the anti-PVRIG antibody is CHA.7.538.1.2.H4(S241P), the anti-PD-L1 antibody is durvalumab, and the anti-TIGIT antibody one of the above and/or from FIG. 3.

[0618] In some embodiments, the anti-PVRIG antibody is CHA.7.518.1.H4(S241P), the anti-PD-L1 antibody is durvalumab, and the anti-TIGIT antibody one of the above and/or from FIG. 3.

[0619] In some embodiments, the anti-PVRIG antibody is CHA.7.538.1.2.H4(S241P), the anti-PD-L1 antibody is durvalumab, and the anti-TIGIT antibody one of the above and/or from FIG. 3.

[0620] In some embodiments, the anti-TIGIT antibody is CPA.9.083.H4(S241P), the anti-PVRIG antibody is CHA.7.538.1.2.H4(S241P), and the anti-PD-L1 antibody is atezolizumab.

[0621] In some embodiments, the anti-TIGIT antibody is CPA.9.083.H4(S241P), the anti-PVRIG antibody is CHA.7.518.1.H4(S241P), and the anti-PD-L1 antibody is atezolizumab.

[0622] In some embodiments, the anti-TIGIT antibody is CPA.9.086.H4(S241P), the anti-PVRIG antibody is CHA.7.538.1.2.H4(S241P), and the anti-PD-L1 antibody is atezolizumab.

[0623] In some embodiments, the anti-TIGIT antibody is CPA.9.086.H4(S241P), the anti-PVRIG antibody is CHA.7.518.1.H4(S241P), and the anti-PD-L1 antibody is atezolizumab.

[0624] In some embodiments, the anti-TIGIT antibody is CHA.9.547.7.H4(S241P), the anti-PVRIG antibody is CHA.7.538.1.2.H4(S241P), and the anti-PD-L1 antibody is atezolizumab.

[0625] In some embodiments, the anti-TIGIT antibody is CHA.9.547.7.H4(S241P), the anti-PVRIG antibody is CHA.7.518.1.H4(S241P), and the anti-PD-L1 antibody is atezolizumab.

[0626] In some embodiments, the anti-TIGIT antibody is CHA.9.547.13.H4(S241P), the anti-PVRIG antibody is CHA.7.538.1.2.H4(S241P), and the anti-PD-L1 antibody is atezolizumab.

[0627] In some embodiments, the anti-TIGIT antibody is CHA.9.547.13.H4(S241P), the anti-PVRIG antibody is CHA.7.518.1.H4(S241P), and the anti-PD-L1 antibody is atezolizumab.

[0628] In some embodiments, the anti-TIGIT antibody is CPA.9.083.H4(S241P), the anti-PVRIG antibody is CHA.7.538.1.2.H4(S241P), and the anti-PD-L1 antibody is avelumab.

[0629] In some embodiments, the anti-TIGIT antibody is CPA.9.083.H4(S241P), the anti-PVRIG antibody is CHA.7.518.1.H4(S241P), and the anti-PD-L1 antibody is avelumab.

[0630] In some embodiments, the anti-TIGIT antibody is CPA.9.086.H4(S241P), the anti-PVRIG antibody is CHA.7.538.1.2.H4(S241P), and the anti-PD-L1 antibody is avelumab.

[0631] In some embodiments, the anti-TIGIT antibody is CPA.9.086.H4(S241P), the anti-PVRIG antibody is CHA.7.518.1.H4(S241P), and the anti-PD-L1 antibody is avelumab.

[0632] In some embodiments, the anti-TIGIT antibody is CHA.9.547.7.H4(S241P), the anti-PVRIG antibody is CHA.7.538.1.2.H4(S241P), and the anti-PD-L1 antibody is avelumab.

[0633] In some embodiments, the anti-TIGIT antibody is CHA.9.547.7.H4(S241P), the anti-PVRIG antibody is CHA.7.518.1.H4(S241P), and the anti-PD-L1 antibody is avelumab.

[0634] In some embodiments, the anti-TIGIT antibody is CHA.9.547.13.H4(S241P), the anti-PVRIG antibody is CHA.7.538.1.2.H4(S241P), and the anti-PD-L1 antibody is avelumab.

[0635] In some embodiments, the anti-TIGIT antibody is CHA.9.547.13.H4(S241P), the anti-PVRIG antibody is CHA.7.518.1.H4(S241P), and the anti-PD-L1 antibody is avelumab.

[0636] In some embodiments, the anti-TIGIT antibody is CPA.9.083.H4(S241P), the anti-PVRIG antibody is CHA.7.538.1.2.H4(S241P), and the anti-PD-L1 antibody is durvalumab.

[0637] In some embodiments, the anti-TIGIT antibody is CPA.9.083.H4(S241P), the anti-PVRIG antibody is CHA.7.518.1.H4(S241P), and the anti-PD-L1 antibody is durvalumab.

[0638] In some embodiments, the anti-TIGIT antibody is CPA.9.086.H4(S241P), the anti-PVRIG antibody is CHA.7.538.1.2.H4(S241P), and the anti-PD-L1 antibody is durvalumab.

[0639] In some embodiments, the anti-TIGIT antibody is CPA.9.086.H4(S241P), the anti-PVRIG antibody is CHA.7.518.1.H4(S241P), and the anti-PD-L1 antibody is durvalumab.

[0640] In some embodiments, the anti-TIGIT antibody is CHA.9.547.7.H4(S241P), the anti-PVRIG antibody is CHA.7.538.1.2.H4(S241P), and the anti-PD-L1 antibody is durvalumab.

[0641] In some embodiments, the anti-TIGIT antibody is CHA.9.547.7.H4(S241P), the anti-PVRIG antibody is CHA.7.518.1.H4(S241P), and the anti-PD-L1 antibody is durvalumab.

[0642] In some embodiments, the anti-TIGIT antibody is CHA.9.547.13.H4(5241P), the anti-PVRIG antibody is CHA.7.538.1.2.H4(S241P), and the anti-PD-L1 antibody is durvalumab.

[0643] In some embodiments, the anti-TIGIT antibody is CHA.9.547.13.H4(S241P), the anti-PVRIG antibody is CHA.7.518.1.H4(S241P), and the anti-PD-L1 antibody is durvalumab.

### B. Biomarker Analysis

[0644] As shown herein, the selection of the combination therapy to administer can be done using an evaluation of the expression of particular biomarkers from tumor biopsy. That is, by taking a biopsy from a tumor sample of a patient and testing for the presence and levels of certain proteins using protein staining and sorting, a suitable therapy can be chosen. As shown in Example 2, cells from tumors can be screened to identify immune and non-immune cell populations, and then the immune cell populations assessed for the levels of a number of biomarkers including PD-1, PD-L1, PVRIG, PVR, PVRL2 and TIGIT, including by examining both ligand and antigen levels.

[0645] Thus, for example, to identify immune cell populations, antibodies to one or more of CD45, CD3, CD8, CD33, CD25, CD127, CD14, CD4 and CD56 can be assessed to categorize the cell populations in the tumor sample as shown below in Table 1:

| Cell Subset Name | Gating Markers |
|---|---|
| CD4⁺ T cells | CD45⁺CD3⁺CD14⁻CD4⁺ |
| CD8⁺ T cells | CD45⁺CD3⁺CD14⁻CD8⁺ |
| CD4⁻CD8⁻ T cells | CD45⁺CD3⁺CD14⁻CD4⁻CD8⁻ |
| NK cells | CD45⁺CD3⁻CD14⁻CD56⁺ |
| Monocytes | CD45⁺CD3⁻CD14⁺ |
| mDCs | CD45⁺CD3⁻CD14⁻CD56⁻CD33^{hi} |
| pDCs | CD45⁺CD3⁻CD14⁻CD56⁻CD33^{mid} |
| CD45⁻ cells | CD45⁻ |

[0646] Several of these cell types are then assessed for expression of one or more of PD-1, PD-L1, PVRIG, PVR, PVRL2 and TIGIT, generally using labeled antibodies and scored. If the percentage of PD-L1 positive tumor cells or immune cells is greater than 1% (>1%) compared to the same tumor cells stained with antibody relevant isotype control antibody for the antibodies used, then a triple combination of anti-TIGIT, anti-PVRIG and anti-PD1 antibodies should be administered. Whereas, patients with a frequency of PD-L1 positive tumor cells or immune cells below 1% (<1%) compared to the isotype control should be administered a double combination of anti-TIGIT and anti-PVRIG antibodies.

### 1. Combination Therapy of Anti-TIGIT, Anti-PVRIG and Anti-PD-1 Antibodies

[0647] In some embodiments, once the immune cells from the tumor have been optionally tested for expression of at least one cell surface marker selected from PD-1, PD-L1, PVRIG, PVR, PVRL2 and TIGIT, therapeutic decisions can be made. In the case where the expression of PD-L1 positive tumor cells or immune cells is >1%, the patient can be administered a triple combination of anti-TIGIT, anti-PVRIG and anti-PD-1 antibodies as outlined herein.

[0648] Accordingly, in one embodiment, antibodies containing the CDR sets from the anti-TIGIT antibody CPA.9.083 are combined with antibodies containing the CDR sets from the anti-PVRIG antibody CHA.7.518.1 and pembrolizumab. In a particular embodiment, CPA.9.083.H4(S241P) is combined with CHA.7.518.1.H4(S241P) and pembrolizumab.

[0649] In one embodiment, antibodies containing the CDR sets from the anti-TIGIT antibody CPA.9.083 are combined with antibodies containing the CDR sets from the anti-PVRIG antibody CHA.7.538.1.2 and pembrolizumab. In a particular embodiment, CPA.9.083.H4(S241P) is combined with CHA.7.538.1.2.H4(S241P) and pembrolizumab.

[0650] In one embodiment, antibodies containing the CDR sets from the anti-TIGIT antibody CPA.9.086 are combined with antibodies containing the CDR sets from the anti-PVRIG antibody CHA.7.518.1 and pembrolizumab. In a particular embodiment, CPA.9.086.H4(S241P is combined with CHA.7.518.1.H4(S241P) and pembrolizumab.

[0651] In one embodiment, antibodies containing the CDR sets from the anti-TIGIT antibody CPA.9.086 are combined with antibodies containing the CDR sets from the anti-PVRIG antibody CHA.7.538.1.2 and pembrolizumab. In a particular embodiment, CPA.9.086.H4(S241P) is combined with CHA.7.538.1.2.H4(S241P) and pembrolizumab.

[0652] In one embodiment, antibodies containing the CDR sets from the anti-TIGIT antibody CHA.9.547.7 are combined with antibodies containing the CDR sets from the anti-PVRIG antibody CHA.7.518.1 and pembrolizumab. In a particular embodiment, CHA.9.547.7H4(S241P) is combined with CHA.7.518.1.H4(S241P) and pembrolizumab.

[0653] In one embodiment, antibodies containing the CDR sets from the anti-TIGIT antibody CHA.9.547.7 are combined with antibodies containing the CDR sets from the anti-PVRIG antibody CHA.7.538.1.2 and pembrolizumab. In a particular embodiment, CHA.9.547.7.H4(S241P) is combined with CHA.7.538.1.2.H4(S241P) and pembrolizumab.

[0654] In one embodiment, antibodies containing the CDR sets from the anti-TIGIT antibody CHA.9.547.13 are combined with antibodies containing the CDR sets from the anti-PVRIG antibody CHA.7.518.1 and pembrolizumab. In a particular embodiment, CHA.9.547.13.H4(S241P) is combined with CHA.7.518.1.H4(S241P) and pembrolizumab.

[0655] In one embodiment, antibodies containing the CDR sets from the anti-TIGIT antibody CHA.9.547.13 are combined with antibodies containing the CDR sets from the anti-PVRIG antibody CHA.7.538.1.2 and pembrolizumab. In a particular embodiment, CHA.9.547.13.H4(S241P) is combined with CHA.7.538.1.2.H4(S241P) and pembrolizumab.

[0656] Accordingly, in one embodiment, antibodies containing the CDR sets from the anti-TIGIT antibody CPA.9.083 are combined with antibodies containing the CDR sets from the anti-PVRIG antibody CHA.7.518.1 and nivolumab. In a particular embodiment, CPA.9.083.H4(S241P) is combined with CHA.7.518.1.H4(S241P) and nivolumab.

[0657] In one embodiment, antibodies containing the CDR sets from the anti-TIGIT antibody CPA.9.083 are combined with antibodies containing the CDR sets from the anti-PVRIG antibody CHA.7.538.1.2 and nivolumab. In a particular embodiment, CPA.9.083.H4(S241P) is combined with CHA.7.538.1.2.H4(S241P) and nivolumab.

[0658] In one embodiment, antibodies containing the CDR sets from the anti-TIGIT antibody CPA.9.086 are combined with antibodies containing the CDR sets from the anti-PVRIG antibody CHA.7.518.1 and nivolumab. In a particular embodiment, CPA.9.086.H4(S241P is combined with CHA.7.518.1.H4(S241P) and nivolumab.

[0659] In one embodiment, antibodies containing the CDR sets from the anti-TIGIT antibody CPA.9.086 are combined with antibodies containing the CDR sets from the anti-PVRIG antibody CHA.7.538.1.2 and nivolumab. In a particular embodiment, CPA.9.086.H4(S241P) is combined with CHA.7.538.1.2.H4(S241P) and nivolumab.

[0660] In one embodiment, antibodies containing the CDR sets from the anti-TIGIT antibody CHA.9.547.7 are combined with antibodies containing the CDR sets from the anti-PVRIG antibody CHA.7.518.1 and nivolumab. In a particular embodiment, CHA.9.547.7H4(S241P) is combined with CHA.7.518.1.H4(S241P) and nivolumab.

[0661] In one embodiment, antibodies containing the CDR sets from the anti-TIGIT antibody CHA.9.547.7 are combined with antibodies containing the CDR sets from the anti-PVRIG antibody CHA.7.538.1.2 and nivolumab. In a particular embodiment, CHA.9.547.7.H4(S241P) is combined with CHA.7.538.1.2.H4(S241P) and nivolumab.

[0662] In one embodiment, antibodies containing the CDR sets from the anti-TIGIT antibody CHA.9.547.13 are combined with antibodies containing the CDR sets from the anti-PVRIG antibody CHA.7.518.1 and nivolumab. In a particular embodiment, CHA.9.547.13.H4(S241P) is combined with CHA.7.518.1.H4(S241P) and nivolumab.

[0663] In one embodiment, antibodies containing the CDR sets from the anti-TIGIT antibody CHA.9.547.13 are combined with antibodies containing the CDR sets from the anti-PVRIG antibody CHA.7.538.1.2 and nivolumab. In a particular embodiment, CHA.9.547.13.H4(S241P) is combined with CHA.7.538.1.2.H4(S241P) and nivolumab.

[0664] Accordingly, in one embodiment, antibodies containing the CDR sets from the anti-TIGIT antibody CPA.9.083 are combined with antibodies containing the CDR sets from the anti-PVRIG antibody CHA.7.518.1 and cemiplimab. In a particular embodiment, CPA.9.083.H4(S241P) is combined with CHA.7.518.1.H4(S241P) and cemiplimab.

[0665] In one embodiment, antibodies containing the CDR sets from the anti-TIGIT antibody CPA.9.083 are combined with antibodies containing the CDR sets from the anti-PVRIG antibody CHA.7.538.1.2 and cemiplimab. In a particular embodiment, CPA.9.083.H4(S241P) is combined with CHA.7.538.1.2.H4(S241P) and cemiplimab.

[0666] In one embodiment, antibodies containing the CDR sets from the anti-TIGIT antibody CPA.9.086 are combined with antibodies containing the CDR sets from the anti-PVRIG antibody CHA.7.518.1 and cemiplimab. In a particular embodiment, CPA.9.086.H4(S241P is combined with CHA.7.518.1.H4(S241P) and cemiplimab.

[0667] In one embodiment, antibodies containing the CDR sets from the anti-TIGIT antibody CPA.9.086 are combined with antibodies containing the CDR sets from the anti-PVRIG antibody CHA.7.538.1.2 and cemiplimab. In a particular embodiment, CPA.9.086.H4(S241P) is combined with CHA.7.538.1.2.H4(S241P) and cemiplimab.

[0668] In one embodiment, antibodies containing the CDR sets from the anti-TIGIT antibody CHA.9.547.7 are combined with antibodies containing the CDR sets from the anti-PVRIG antibody CHA.7.518.1 and cemiplimab. In a particular embodiment, CHA.9.547.7H4(S241P) is combined with CHA.7.518.1.H4(S241P) and cemiplimab.

[0669] In one embodiment, antibodies containing the CDR sets from the anti-TIGIT antibody CHA.9.547.7 are combined with antibodies containing the CDR sets from the anti-PVRIG antibody CHA.7.538.1.2 and cemiplimab. In a particular embodiment, CHA.9.547.7.H4(S241P) is combined with CHA.7.538.1.2.H4(S241P) and cemiplimab.

[0670] In one embodiment, antibodies containing the CDR sets from the anti-TIGIT antibody CHA.9.547.13 are combined with antibodies containing the CDR sets from the anti-PVRIG antibody CHA.7.518.1 and cemiplimab. In a particular embodiment, CHA.9.547.13.H4(S241P) is combined with CHA.7.518.1.H4(S241P) and cemiplimab.

[0671] In one embodiment, antibodies containing the CDR sets from the anti-TIGIT antibody CHA.9.547.13 are combined with antibodies containing the CDR sets from the anti-PVRIG antibody CHA.7.538.1.2 and cemiplimab. In a particular embodiment, CHA.9.547.13.H4(S241P) is combined with CHA.7.538.1.2.H4(S241P) and cemiplimab.

### 2. Combination Therapy of Anti-TIGIT and Anti-PVRIG Antibodies

[0672] Similarly, once the once the immune cells from the tumor have been tested for expression of at least one cell surface marker selected from PD-1, PD-L1, PVRIG, PVR, PVRL2 and TIGIT, therapeutic decisions can be made. In the case where the expression of PD-L1 positive tumor cells or immune cells is <1%, the patient can be administered a double combination of anti-TIGIT and anti-PVRIG antibodies as outlined herein.

[0673] Accordingly, in one embodiment, antibodies containing the CDR sets from the anti-TIGIT antibody CPA.9.083 are combined with antibodies containing the CDR sets from the anti-PVRIG antibody CHA.7.518.1. In a particular embodiment, CPA.9.083.H4(S241P) is combined with CHA.7.518.1.H4(S241P).

[0674] In one embodiment, antibodies containing the CDR sets from the anti-TIGIT antibody CPA.9.083 are combined with antibodies containing the CDR sets from the anti-PVRIG antibody CHA.7.538.1.2. In a particular embodiment, CPA.9.083.H4(S241P) is combined with CHA.7.538.1.2.H4(S241P).

[0675] In one embodiment, antibodies containing the CDR sets from the anti-TIGIT antibody CPA.9.086 are combined with antibodies containing the CDR sets from the anti-PVRIG antibody CHA.7.518.1. In a particular embodiment, CPA.9.086.H4(S241P is combined with CHA.7.518.1.H4(S241P).

[0676] In one embodiment, antibodies containing the CDR sets from the anti-TIGIT antibody CPA.9.086 are combined with antibodies containing the CDR sets from the anti-PVRIG antibody CHA.7.538.1.2. In a particular embodiment, CPA.9.086.H4(S241P) is combined with CHA.7.538.1.2.H4(S241P).

[0677] In one embodiment, antibodies containing the CDR sets from the anti-TIGIT antibody CHA.9.547.7 are combined with antibodies containing the CDR sets from the anti-PVRIG antibody CHA.7.518.1. In a particular embodiment, CHA.9.547.7H4(S241P) is combined with CHA.7.518.1.H4(S241P).

[0678] In one embodiment, antibodies containing the CDR sets from the anti-TIGIT antibody CHA.9.547.7 are combined with antibodies containing the CDR sets from the anti-PVRIG antibody CHA.7.538.1.2. In a particular embodiment, CHA.9.547.7.H4(S241P) is combined with CHA.7.538.1.2.H4(S241P).

[0679] In one embodiment, antibodies containing the CDR sets from the anti-TIGIT antibody CHA.9.547.13 are combined with antibodies containing the CDR sets from the anti-PVRIG antibody CHA.7.518.1. In a particular embodiment, CHA.9.547.13.H4(S241P) is combined with CHA.7.518.1.H4(S241P).

[0680] In one embodiment, antibodies containing the CDR sets from the anti-TIGIT antibody CHA.9.547.13 are combined with antibodies containing the CDR sets from the anti-PVRIG antibody CHA.7.538.1.2. In a particular embodiment, CHA.9.547.13.H4(S241P) is combined with CHA.7.538.1.2.H4(S241P).

[0681] In one embodiment, the invention provides combinations of the anti-TIGIT antibodies of the invention and anti-PD-1 antibodies. In one embodiment, the invention provides combinations of the anti-TIGIT antibodies of the invention and anti-PD-L1 antibodies.

[0682] In one embodiment, a biopsy is taken from a tumor from a patient with cancer, and dissociated as is known in the art for FACS analysis. The cells are stained with labeled antibodies to (1) TIGIT (for example using any described herein or others in the art such as MBSA43); (2) PD-1 (for example using those known in the art including EH12.2H7, Keytruda®, Opdivo®, Cemiplimab, etc.); (3) PD-L1 (for example using those known in the art such as BM-1, atezolizumab, avelumab, and durvalumab, outlined herein) and (4) PVR (for example using those known in the art such as SKII.4); and (5) a relevant isotype control antibody for the antibodies used. FACS is done, and for each receptor, the percentage of the cells expressing the receptor relative to the control antibody is calculated. If the percentage of positive cells for TIGIT, PD-1, PD-1 and PVR is >1% for all 4 receptors, then the patient is treated with antibodies to TIGIT and PD-1 as outlined herein.

[0683] In one embodiment, a biopsy is taken from a tumor from a patient with cancer, and dissociated as is known in the art for FACS analysis. The cells are stained with labeled antibodies to (1) PVRIG (generally using CHA.7.518.1H4(S241P), for example, although any outlined in WO2016/134333 (specifically including any that bind, even if they don't block) or WO2017/041004) can be used); (2) PD-1 (for example using those known in the art including EH12.2H7, Keytruda®, Opdivo®, Cemiplimab, etc.); (3) PD-L1 (for example using those known in the art such as BM-1, atezolizumab, avelumab, and durvalumab, outlined herein) and (4) PVRL2 (for example using those known in the art such as TX11); and (5) a relevant isotype control antibody for the antibodies used. FACS is done, and for each receptor, the percentage of the cells expressing the receptor relative to the control antibody is calculated. If the percentage of positive cells for PVRIG, PD-1, PD-1 and PVRL2 is ≥1% for all 4 receptors, then the patient is treated with antibodies to PVRIG and PD-1 as outlined herein.

[0684] In one embodiment, a biopsy is taken from a tumor from a patient with cancer, and dissociated as is known in the art for FACS analysis. The cells are stained with labeled antibodies to (1) PVRIG (generally using CHA.7.518.1H4(S241P), for example, although any outlined in WO2016/134333 (specifically including any that bind, even if they don't block) or WO2017/041004) can be used); (2) TIGIT (for example using any described herein or others in the art such as MBSA43); (3) PVR (for example using those known in the art such as SKII.4) and (4) PVRL2 (for example using those known in the art such as TX11); and (5) a relevant isotype control antibody for the antibodies used. FACS is done, and for each receptor, the percentage of the cells expressing the receptor relative to the control antibody is calculated. If the percentage of positive cells for PVRIG, TIGIT, PVR and PVRL2 is >1% for all 4 receptors, then the patient is treated with antibodies to PVRIG and TIGIT. Preferred combinations in this regard are CHA.7.518.1.H4(S241P) and CPA.9.086.

[0685] In one embodiment, a biopsy is taken from a tumor from a patient with cancer, and dissociated as is known in the art for FACS analysis. The cells are stained with labeled antibodies to (1) PVRIG (generally using CHA.7.518.1H4(S241P), for example, although any outlined in WO2016/134333 (specifically including any that bind, even if they don't block) or WO2017/041004) can be used); (2) TIGIT (for example using any described herein or others in the art such as MBSA43); (3) PVR (for example using those known in the art such as SKII.4) and (4) PVRL2 (for example using those known in the art such as TX11); (5) PD-1 (for example using those known in the art including EH12.2H7, Keytruda®, Opdivo®, Cemiplimab, etc.); and (6) a relevant isotype control antibody for the antibodies used. FACS is done, and for each receptor, the percentage of the cells expressing the receptor relative to the control antibody is calculated. If the percentage of positive cells for PVRIG, TIGIT, PVR, PVRL2 and PD-1 is ≥1% for all 5 receptors, then the patient is treated with antibodies to PVRIG, TIGIT, and PD-1. Preferred combinations in this regard are CHA.7.518.1.H4(S241P), CPA.9.086, and EH12.2H7. Other preferred combinations in this regard are CHA.7.518.1.H4(S241P), CPA.9.086, and Keytruda®. Yet other preferred combinations in this regard are CHA.7.518.1.H4(S241P), CPA.9.086, and Opdivo®.

[0686] In one embodiment, a biopsy is taken from a tumor from a patient with cancer, and dissociated as is known in the art for FACS analysis. The cells are stained with labeled antibodies to (1) PVRIG (generally using CHA.7.518.1H4(S241P), for example, although any outlined in WO2016/134333 (specifically including any that bind, even if they don't block) or WO2017/041004) can be used); (2) TIGIT (for example using any described herein or others in the art such as MBSA43); ((3) PD-L1 (for example using those known in the art such as BM-1, atezolizumab, avelumab, and durvalumab, outlined herein) and (4) PVR (for example using those known in the art such as SKII.4); (5) PD-1 (for example using those known in the art including EH12.2H7, Keytruda®, Opdivo®, Cemiplimab, etc.); and (6) a relevant isotype control antibody for the antibodies used. FACS is done, and for each receptor, the percentage of the cells expressing the receptor relative to the control antibody is calculated. If the percentage of positive cells for PVRIG, TIGIT, PD-L1, PVR and PD-1 is >1% for all 5 receptors, then the patient is treated with antibodies to PVRIG, TIGIT, and PD-1. Preferred combinations in this regard are CHA.7.518.1.H4(S241P), CPA.9.086, and EH12.2H7. Other preferred combinations in this regard are CHA.7.518.1.H4(S241P), CPA.9.086, and Keytruda®. Yet other preferred combinations in this regard are CHA.7.518.1.H4(S241P), CPA.9.086, and Opdivo®.

### 3. Combination Therapy of Anti-TIGIT and Anti-PVRIG Antibodies with PD-1 Antibodies for Refractory Patients

[0687] In some embodiments, the treatment includes a combination of anti-TIGIT antibodies, anti-PVRIG antibodies, and anti-PD-1 antibodies for targeting tumor cells with high PD-L1 expression. In some embodiments, the treatment includes a combination of anti-TIGIT antibodies, anti-PVRIG antibodies, and anti-PD-1 antibodies for use in a patient whose tumors express PD-L1. In some embodiments, the treatment includes a combination of anti-TIGIT antibodies, anti-PVRIG antibodies, and anti-PD-1 antibodies for use in a cancer patient whose tumor expresses PD-L1 and/or who is refractory to anti-PD-1 therapeutics. In some embodiments, the treatment includes a combination of anti-TIGIT antibodies, anti-PVRIG antibodies, and anti-PD-1 antibodies for use in a cancer patient whose tumor expresses PD-L1 and who is refractory to anti-PD-1 therapeutics.

[0688] Accordingly, in one embodiment, antibodies containing the CDR sets from the anti-TIGIT antibody CPA.9.083 are combined with antibodies containing the CDR sets from the anti-PVRIG antibody CHA.7.518.1 and pembrolizumab for use in a cancer patient whose tumor expresses PD-L1 and/or who is refractory to anti-PD-1 therapeutics. In a particular embodiment, CPA.9.083.H4(S241P) is combined with CHA.7.518.1.H4(S241P) and pembrolizumab for use in a cancer patient whose tumor expresses PD-L1 and/or who is refractory to anti-PD-1 therapeutics.

[0689] In one embodiment, antibodies containing the CDR sets from the anti-TIGIT antibody CPA.9.083 are combined with antibodies containing the CDR sets from the anti-PVRIG antibody CHA.7.538.1.2 and pembrolizuma for use in a cancer patient whose tumor expresses PD-L1 and/or who is refractory to anti-PD-1 therapeutics b. In a particular embodiment, CPA.9.083.H4(S241P) is combined with CHA.7.538.1.2.H4(S241P) and pembrolizumab for use in a cancer patient whose tumor expresses PD-L1 and/or who is refractory to anti-PD-1 therapeutics.

[0690] In one embodiment, antibodies containing the CDR sets from the anti-TIGIT antibody CPA.9.086 are combined with antibodies containing the CDR sets from the anti-PVRIG antibody CHA.7.518.1 and pembrolizumab for use in a cancer patient whose tumor expresses PD-L1 and/or who is refractory to anti-PD-1 therapeutics. In a particular embodiment, CPA.9.086.H4(S241P is combined with CHA.7.518.1.H4(S241P) and pembrolizumab for use in a cancer patient whose tumor expresses PD-L1 and/or who is refractory to anti-PD-1 therapeutics.

[0691] In one embodiment, antibodies containing the CDR sets from the anti-TIGIT antibody CPA.9.086 are combined with antibodies containing the CDR sets from the anti-PVRIG antibody CHA.7.538.1.2 and pembrolizumab for use in a cancer patient whose tumor expresses PD-L1 and/or who is refractory to anti-PD-1 therapeutics. In a particular embodiment, CPA.9.086.H4(S241P) is combined with CHA.7.538.1.2.H4(S241P) and pembrolizumab for use in a cancer patient whose tumor expresses PD-L1 and/or who is refractory to anti-PD-1 therapeutics.

[0692] In one embodiment, antibodies containing the CDR sets from the anti-TIGIT antibody CHA.9.547.7 are combined with antibodies containing the CDR sets from the anti-PVRIG antibody CHA.7.518.1 and pembrolizumab for use in a cancer patient whose tumor expresses PD-L1 and/or who is refractory to anti-PD-1 therapeutics. In a particular embodiment, CHA.9.547.7H4(S241P) is combined with CHA.7.518.1.H4(S241P) and pembrolizumab for use in a cancer patient whose tumor expresses PD-L1 and/or who is refractory to anti-PD-1 therapeutics.

[0693] In one embodiment, antibodies containing the CDR sets from the anti-TIGIT antibody CHA.9.547.7 are combined with antibodies containing the CDR sets from the anti-PVRIG antibody CHA.7.538.1.2 and pembrolizumab for use in a cancer patient whose tumor expresses PD-L1 and/or who is refractory to anti-PD-1 therapeutics. In a particular embodiment, CHA.9.547.7.H4(S241P) is combined with CHA.7.538.1.2.H4(S241P) and pembrolizumab for use in a cancer patient whose tumor expresses PD-L1 and/or who is refractory to anti-PD-1 therapeutics.

[0694] In one embodiment, antibodies containing the CDR sets from the anti-TIGIT antibody CHA.9.547.13 are combined with antibodies containing the CDR sets from the anti-PVRIG antibody CHA.7.518.1 and pembrolizumab for use in a cancer patient whose tumor expresses PD-L1 and/or who is refractory to anti-PD-1 therapeutics. In a particular embodiment, CHA.9.547.13.H4(S241P) is combined with CHA.7.518.1.H4(S241P) and pembrolizumab for use in a cancer patient whose tumor expresses PD-L1 and/or who is refractory to anti-PD-1 therapeutics.

[0695] In one embodiment, antibodies containing the CDR sets from the anti-TIGIT antibody CHA.9.547.13 are combined with antibodies containing the CDR sets from the anti-PVRIG antibody CHA.7.538.1.2 and pembrolizumab for use in a cancer patient whose tumor expresses PD-L1 and/or who is refractory to anti-PD-1 therapeutics. In a particular embodiment, CHA.9.547.13.H4(S241P) is combined with CHA.7.538.1.2.H4(S241P) and pembrolizumab for use in a cancer patient whose tumor expresses PD-L1 and/or who is refractory to anti-PD-1 therapeutics.

[0696] Accordingly, in one embodiment, antibodies containing the CDR sets from the anti-TIGIT antibody CPA.9.083 are combined with antibodies containing the CDR sets from the anti-PVRIG antibody CHA.7.518.1 and nivolumab for use in a cancer patient whose tumor expresses PD-L1 and/or who is refractory to anti-PD-1 therapeutics. In a particular embodiment, CPA.9.083.H4(S241P) is combined with CHA.7.518.1.H4(S241P) and nivolumab for use in a cancer patient whose tumor expresses PD-L1 and/or who is refractory to anti-PD-1 therapeutics.

[0697] In one embodiment, antibodies containing the CDR sets from the anti-TIGIT antibody CPA.9.083 are combined with antibodies containing the CDR sets from the anti-PVRIG antibody CHA.7.538.1.2 and nivolumab for use in a cancer patient whose tumor expresses PD-L1 and/or who is refractory to anti-PD-1 therapeutics. In a particular embodiment, CPA.9.083.H4(S241P) is combined with CHA.7.538.1.2.H4(S241P) and nivolumab for use in a cancer patient whose tumor expresses PD-L1 and/or who is refractory to anti-PD-1 therapeutics.

[0698] In one embodiment, antibodies containing the CDR sets from the anti-TIGIT antibody CPA.9.086 are combined with antibodies containing the CDR sets from the anti-PVRIG antibody CHA.7.518.1 and nivolumab for use in a cancer patient whose tumor expresses PD-L1 and/or who is refractory to anti-PD-1 therapeutics. In a particular embodiment, CPA.9.086.H4(S241P is combined with CHA.7.518.1.H4(S241P) and nivolumab for use in a cancer patient whose tumor expresses PD-L1 and/or who is refractory to anti-PD-1 therapeutics.

[0699] In one embodiment, antibodies containing the CDR sets from the anti-TIGIT antibody CPA.9.086 are combined with antibodies containing the CDR sets from the anti-PVRIG antibody CHA.7.538.1.2 and nivolumab for use in a cancer patient whose tumor expresses PD-L1 and/or who is refractory to anti-PD-1 therapeutics. In a particular embodiment, CPA.9.086.H4(S241P) is combined with CHA.7.538.1.2.H4(S241P) and nivolumab for use in a cancer patient whose tumor expresses PD-L1 and/or who is refractory to anti-PD-1 therapeutics.

[0700] In one embodiment, antibodies containing the CDR sets from the anti-TIGIT antibody CHA.9.547.7 are combined with antibodies containing the CDR sets from the anti-PVRIG antibody CHA.7.518.1 and nivolumab for use in a cancer patient whose tumor expresses PD-L1 and/or who is refractory to anti-PD-1 therapeutics. In a particular embodiment, CHA.9.547.7H4(S241P) is combined with CHA.7.518.1.H4(S241P) and nivolumab for use in a cancer patient whose tumor expresses PD-L1 and/or who is refractory to anti-PD-1 therapeutics.

[0701] In one embodiment, antibodies containing the CDR sets from the anti-TIGIT antibody CHA.9.547.7 are combined with antibodies containing the CDR sets from the anti-PVRIG antibody CHA.7.538.1.2 and nivolumab for use in a cancer patient whose tumor expresses PD-L1 and/or who is refractory to anti-PD-1 therapeutics. In a particular embodiment, CHA.9.547.7.H4(S241P) is combined with CHA.7.538.1.2.H4(S241P) and nivolumab for use in a cancer patient whose tumor expresses PD-L1 and/or who is refractory to anti-PD-1 therapeutics.

[0702] In one embodiment, antibodies containing the CDR sets from the anti-TIGIT antibody CHA.9.547.13 are combined with antibodies containing the CDR sets from the anti-PVRIG antibody CHA.7.518.1 and nivolumab for use in a cancer patient whose tumor expresses PD-L1 and/or who is refractory to anti-PD-1 therapeutics. In a particular embodiment, CHA.9.547.13.H4(S241P) is combined with CHA.7.518.1.H4(S241P) and nivolumab for use in a cancer patient whose tumor expresses PD-L1 and/or who is refractory to anti-PD-1 therapeutics.

[0703] In one embodiment, antibodies containing the CDR sets from the anti-TIGIT antibody CHA.9.547.13 are combined with antibodies containing the CDR sets from the anti-PVRIG antibody CHA.7.538.1.2 and nivolumab for use in a cancer patient whose tumor expresses PD-L1 and/or who is refractory to anti-PD-1 therapeutics. In a particular embodiment, CHA.9.547.13.H4(S241P) is combined with CHA.7.538.1.2.H4(S241P) and nivolumab for use in a cancer patient whose tumor expresses PD-L1 and/or who is refractory to anti-PD-1 therapeutics.

[0704] In some embodiments, the anti-TIGIT antibody is an antibody chosen from any anti-TIGIT antibody described herein, including any of those described in FIG. 3. In some embodiments, the anti-PVRIG antibody is an antibody chosen from any anti-PVRIG antibody described herein, including any of those described in FIG. 5 and/or FIG. 63. In some embodiments, the anti-PD-1 antibody is an antibody chosen from any anti-PD-1 antibody described herein, including any of those described in FIG. 7.

### 4. Assessment of Treatment

[0705] Generally, the antibodies of the invention, alone or in combination (PVRIG with PD-1, TIGIT with PD-1 or TIGIT with PVRIG, and/or PVRIG with both TIGIT and PD-1) are administered to patients with cancer, and efficacy is assessed, in a number of ways as described herein. Thus, while standard assays of efficacy can be run, such as cancer load, size of tumor, evaluation of presence or extent of metastasis, etc., immuno-oncology treatments can be assessed on the basis of immune status evaluations as well. This can be done in a number of ways, including both in vitro and in vivo assays. For example, evaluation of changes in immune status (e.g. presence of ICOS+CD4+ T cells following ipi treatment) along with “old fashioned” measurements such as tumor burden, size, invasiveness, LN involvement, metastasis, etc. can be done. Thus, any or all of the following can be evaluated: the inhibitory effects of PVRIG on CD4⁺ T cell activation or proliferation, CD8⁺ T (CTL) cell activation or proliferation, CD8⁺ T cell-mediated cytotoxic activity and/or CTL mediated cell depletion, NK cell activity and NK mediated cell depletion, the potentiating effects of PVRIG on Treg cell differentiation and proliferation and Treg—or myeloid derived suppressor cell (MDSC)—mediated immunosuppression or immune tolerance, and/or the effects of PVRIG on proinflammatory cytokine production by immune cells, e.g., IL-2, IFN-γ or TNF-α production by T or other immune cells.

[0706] In some embodiments, assessment of treatment is done by evaluating immune cell proliferation, using for example, CFSE dilution method, Ki67 intracellular staining of immune effector cells, and 3H-Thymidine incorporation method.

[0707] In some embodiments, assessment of treatment is done by evaluating the increase in gene expression or increased protein levels of activation-associated markers, including one or more of: CD25, CD69, CD137, ICOS, PD1, GITR, OX40, and cell degranulation measured by surface expression of CD107A.

[0708] In some embodiments, the assessment of treatment is done by assessing the amount of T cell proliferation in the absence of treatment, for example prior to administration of the antibodies of the invention. If, after administration, the patient has an increase in T cell proliferation, e.g. a subset of the patient's T cells are proliferating, this is an indication that the T cells were activated.

[0709] Similarly, assessment of treatment with the antibodies of the invention can be done by measuring the patient's IFN-γ levels prior to administration and post-administration to assess efficacy of treatment. This may be done within hours or days.

[0710] In general, gene expression assays are done as is known in the art. See for example Goodkind et al., Computers and Chem. Eng. 29(3):589 (2005), Han et al., Bioinform. Biol. Insights 11/15/15 9(Suppl. 1):29-46, Campo et al., Nod. Pathol. 2013 January; 26 suppl. 1:S97-S110, the gene expression measurement techniques of which are expressly incorporated by reference herein.

[0711] In general, protein expression measurements are also similarly done as is known in the art, see for example, Wang et al., Recent Advances in Capillary Electrophoresis-Based Proteomic Techniques for Biomarker Discovery, Methods. Mol. Biol. 2013:984:1-12; Taylor et al, BioMed Res. Volume 2014, Article ID 361590, 8 pages, Becerk et al., Mutat. Res 2011 Jun. 17:722(2): 171-182, the measurement techniques of which are expressly incorporated herein by reference.

[0712] In some embodiments, assessment of treatment is done by assessing cytotoxic activity measured by target cell viability detection via estimating numerous cell parameters such as enzyme activity (including protease activity), cell membrane permeability, cell adherence, ATP production, co-enzyme production, and nucleotide uptake activity. Specific examples of these assays include, but are not limited to, Trypan Blue or PI staining, ⁵¹Cr or ³⁵S release method, LDH activity, MTT and/or WST assays, Calcein-AM assay, Luminescent based assay, and others.

[0713] In some embodiments, assessment of treatment is done by assessing T cell activity measured by cytokine production, measure either intracellularly in culture supernatant using cytokines including, but not limited to, IFN-γ, TNF-α, GM-CSF, IL-2, IL-6, IL-4, IL-5, IL-10, and/or IL-13 using well known techniques.

[0714] Accordingly, assessment of treatment can be done using assays that evaluate one or more of the following: (i) increases in immune response, (ii) increases in activation of αβ and/or γδ T cells, (iii) increases in cytotoxic T cell activity, (iv) increases in NK and/or NKT cell activity, (v) alleviation of αβ and/or γδ T-cell suppression, (vi) increases in pro-inflammatory cytokine secretion, (vii) increases in IL-2 secretion; (viii) increases in interferon-γ production, (ix) increases in Th1 response, (x) decreases in Th2 response, (xi) decreases or eliminates cell number and/or activity of at least one of regulatory T cells (Tregs).

### Assays to Measure Efficacy

[0715] In some embodiments, T cell activation is assessed using a Mixed Lymphocyte Reaction (MLR) assay as is described in the Examples. An increase in activity indicates immunostimulatory activity. Appropriate increases in activity are outlined below.

[0716] In one embodiment, the signaling pathway assay measures increases or decreases in immune response as measured for an example by phosphorylation or de-phosphorylation of different factors, or by measuring other post translational modifications. An increase in activity indicates immunostimulatory activity. Appropriate increases in activity are outlined below.

[0717] In one embodiment, the signaling pathway assay measures increases or decreases in activation of αβ and/or γδ T cells as measured for an example by cytokine secretion or by proliferation or by changes in expression of activation markers like for an example CD137, CD107a, PD1, etc. An increase in activity indicates immunostimulatory activity. Appropriate increases in activity are outlined below.

[0718] In one embodiment, the signaling pathway assay measures increases or decreases in cytotoxic T cell activity as measured for an example by direct killing of target cells like for an example cancer cells or by cytokine secretion or by proliferation or by changes in expression of activation markers like for an example CD137, CD107a, PD1, etc. An increase in activity indicates immunostimulatory activity. Appropriate increases in activity are outlined below.

[0719] In one embodiment, the signaling pathway assay measures increases or decreases in NK and/or NKT cell activity as measured for an example by direct killing of target cells like for an example cancer cells or by cytokine secretion or by changes in expression of activation markers like for an example CD107a, etc. An increase in activity indicates immunostimulatory activity. Appropriate increases in activity are outlined below.

[0720] In one embodiment, the signaling pathway assay measures increases or decreases in αβ and/or γδ T-cell suppression, as measured for an example by cytokine secretion or by proliferation or by changes in expression of activation markers like for an example CD137, CD107a, PD1, etc. An increase in activity indicates immunostimulatory activity. Appropriate increases in activity are outlined below.

[0721] In one embodiment, the signaling pathway assay measures increases or decreases in pro-inflammatory cytokine secretion as measured for example by ELISA or by Luminex or by Multiplex bead based methods or by intracellular staining and FACS analysis or by Alispot etc. An increase in activity indicates immunostimulatory activity. Appropriate increases in activity are outlined below.

[0722] In one embodiment, the signaling pathway assay measures increases or decreases in IL-2 secretion as measured for example by ELISA or by Luminex or by Multiplex bead based methods or by intracellular staining and FACS analysis or by Alispot etc. An increase in activity indicates immunostimulatory activity. Appropriate increases in activity are outlined below.

[0723] In one embodiment, the signaling pathway assay measures increases or decreases in interferon-γ production as measured for example by ELISA or by Luminex or by Multiplex bead based methods or by intracellular staining and FACS analysis or by Alispot etc. An increase in activity indicates immunostimulatory activity. Appropriate increases in activity are outlined below.

[0724] In one embodiment, the signaling pathway assay measures increases or decreases in Th1 response as measured for an example by cytokine secretion or by changes in expression of activation markers. An increase in activity indicates immunostimulatory activity. Appropriate increases in activity are outlined below.

[0725] In one embodiment, the signaling pathway assay measures increases or decreases in Th2 response as measured for an example by cytokine secretion or by changes in expression of activation markers. An increase in activity indicates immunostimulatory activity. Appropriate increases in activity are outlined below.

[0726] In one embodiment, the signaling pathway assay measures increases or decreases cell number and/or activity of at least one of regulatory T cells (Tregs), as measured for example by flow cytometry or by IHC. A decrease in response indicates immunostimulatory activity. Appropriate decreases are the same as for increases, outlined below.

[0727] In one embodiment, the signaling pathway assay measures increases or decreases in M2 macrophages cell numbers, as measured for example by flow cytometry or by IHC. A decrease in response indicates immunostimulatory activity. Appropriate decreases are the same as for increases, outlined below.

[0728] In one embodiment, the signaling pathway assay measures increases or decreases in M2 macrophage pro-tumorigenic activity, as measured for an example by cytokine secretion or by changes in expression of activation markers. A decrease in response indicates immunostimulatory activity. Appropriate decreases are the same as for increases, outlined below.

[0729] In one embodiment, the signaling pathway assay measures increases or decreases in N2 neutrophils increase, as measured for example by flow cytometry or by IHC. A decrease in response indicates immunostimulatory activity. Appropriate decreases are the same as for increases, outlined below.

[0730] In one embodiment, the signaling pathway assay measures increases or decreases in N2 neutrophils pro-tumorigenic activity, as measured for an example by cytokine secretion or by changes in expression of activation markers. A decrease in response indicates immunostimulatory activity. Appropriate decreases are the same as for increases, outlined below.

[0731] In one embodiment, the signaling pathway assay measures increases or decreases in inhibition of T cell activation, as measured for an example by cytokine secretion or by proliferation or by changes in expression of activation markers like for an example CD137, CD107a, PD1, etc. An increase in activity indicates immunostimulatory activity. Appropriate increases in activity are outlined below.

[0732] In one embodiment, the signaling pathway assay measures increases or decreases in inhibition of CTL activation as measured for an example by direct killing of target cells like for an example cancer cells or by cytokine secretion or by proliferation or by changes in expression of activation markers like for an example CD137, CD107a, PD1, etc. An increase in activity indicates immunostimulatory activity. Appropriate increases in activity are outlined below.

[0733] In one embodiment, the signaling pathway assay measures increases or decreases in αβ and/or γδ T cell exhaustion as measured for an example by changes in expression of activation markers. A decrease in response indicates immunostimulatory activity. Appropriate decreases are the same as for increases, outlined below.

[0734] In one embodiment, the signaling pathway assay measures increases or decreases αβ and/or γδ T cell response as measured for an example by cytokine secretion or by proliferation or by changes in expression of activation markers like for an example CD137, CD107a, PD1, etc. An increase in activity indicates immunostimulatory activity. Appropriate increases in activity are outlined below.

[0735] In one embodiment, the signaling pathway assay measures increases or decreases in stimulation of antigen-specific memory responses as measured for an example by cytokine secretion or by proliferation or by changes in expression of activation markers like for an example CD45RA, CCR7 etc. An increase in activity indicates immunostimulatory activity. Appropriate increases in activity are outlined below.

[0736] In one embodiment, the signaling pathway assay measures increases or decreases in apoptosis or lysis of cancer cells as measured for an example by cytotoxicity assays such as for an example MTT, Cr release, Calcine AM, or by flow cytometry based assays like for an example CFSE dilution or propidium iodide staining etc. An increase in activity indicates immunostimulatory activity. Appropriate increases in activity are outlined below.

[0737] In one embodiment, the signaling pathway assay measures increases or decreases in stimulation of cytotoxic or cytostatic effect on cancer cells. as measured for an example by cytotoxicity assays such as for an example MTT, Cr release, Calcine AM, or by flow cytometry based assays like for an example CFSE dilution or propidium iodide staining etc. An increase in activity indicates immunostimulatory activity. Appropriate increases in activity are outlined below.

[0738] In one embodiment, the signaling pathway assay measures increases or decreases direct killing of cancer cells as measured for an example by cytotoxicity assays such as for an example MTT, Cr release, Calcine AM, or by flow cytometry based assays like for an example CFSE dilution or propidium iodide staining etc. An increase in activity indicates immunostimulatory activity. Appropriate increases in activity are outlined below.

[0739] In one embodiment, the signaling pathway assay measures increases or decreases Th17 activity as measured for an example by cytokine secretion or by proliferation or by changes in expression of activation markers. An increase in activity indicates immunostimulatory activity. Appropriate increases in activity are outlined below.

[0740] In one embodiment, the signaling pathway assay measures increases or decreases in induction of complement dependent cytotoxicity and/or antibody dependent cell-mediated cytotoxicity, as measured for an example by cytotoxicity assays such as for an example MTT, Cr release, Calcine AM, or by flow cytometry based assays like for an example CFSE dilution or propidium iodide staining etc. An increase in activity indicates immunostimulatory activity. Appropriate increases in activity are outlined below.

[0741] In one embodiment, T cell activation is measured for an example by direct killing of target cells like for an example cancer cells or by cytokine secretion or by proliferation or by changes in expression of activation markers like for an example CD137, CD107a, PD1, etc. For T-cells, increases in proliferation, cell surface markers of activation (e.g. CD25, CD69, CD137, PD1), cytotoxicity (ability to kill target cells), and cytokine production (e.g. IL-2, IL-4, IL-6, IFNγ, TNF-α, IL-10, IL-17A) would be indicative of immune modulation that would be consistent with enhanced killing of cancer cells.

[0742] In one embodiment, NK cell activation is measured for example by direct killing of target cells like for an example cancer cells or by cytokine secretion or by changes in expression of activation markers like for an example CD107a, etc. For NK cells, increases in proliferation, cytotoxicity (ability to kill target cells and increases CD107a, granzyme, and perforin expression), cytokine production (e.g. IFNγ and TNF), and cell surface receptor expression (e.g. CD25) would be indicative of immune modulation that would be consistent with enhanced killing of cancer cells.

[0743] In one embodiment, γδ T cell activation is measured for example by cytokine secretion or by proliferation or by changes in expression of activation markers.

[0744] In one embodiment, Th1 cell activation is measured for example by cytokine secretion or by changes in expression of activation markers.

[0745] Appropriate increases in activity or response (or decreases, as appropriate as outlined above), are increases of at least about 5%, 10%, 20%, 30%, 40%, 50%, 60%, 70%, 80%, 90%, 95% or 98 to 99% percent over the signal in either a reference sample or in control samples, for example test samples that do not contain an anti-PVRIG antibody of the invention. Specific increases in activity are depicted in the attached figures. For example, with regard to increases in T cell proliferation, CHA.7.518.1.H4(S241P) shows an increase of about 60% and CHA.7.538.1.2.H4(S241P) shows an increase of 47%; relevant increases are shown in either T cell proliferation or IFN-γ of from about 10 to 70% with from about 20 to 60% also finding use.

[0746] Similarly, increases of at least one-, two-, three-, four- or five-fold as compared to reference or control samples show efficacy.

### X. EXAMPLES

### Example 1: Functional Assays

[0747] The purpose of this study was to characterize the functional activity CHA.7.518.1.H4(S241P) on human T cell function either alone or in combination with an anti-TIGIT and/or anti-PD-1 antibody in primary in vitro cell-based assays. We demonstrate that CHA.7.518.1.H4(S241P) enhanced cytokine production of viral antigen-specific CD8 T cells utilized as a model surrogate antigen to study CD8 T cell responses. Combination of CHA.7.518.1.H4(S241P) with anti-TIGIT antibody lead to an additive or, in some conditions, synergistic increase in T cell function. We also performed a triple combination of CHA.7.518.1.H4(S241P), anti-TIGIT, and anti-PD-1 and observed the greatest increase in T cell function co-cultured with PD-L1hi target tumor cells using the triple combination as compared to the double combination or the individual antibody. In a co-culture with PD-L1lo target tumor cells, the triple combination of CHA.7.518.1.H4(S241P), anti-TIGIT, anti-PD-1 did not further enhance T cell function compared to CHA.7.518.1.H4(S241P) and anti-TIGIT double combination, suggesting that CHA.7.518.1.H4(S241P) and anti-TIGIT treatment may be effective in patients who have low or negative PD-L1 expression. Taken together, we demonstrate an effect of CHA.7.518.1.H4(S241P) in enhancing human CD8⁺ T cell function, either individually or in combination with anti-TIGIT or anti-PD-1.

This report describes the characterization of CHA.7.518.1.H4(S241P), a fully humanized IgG4 anti-PVRIG antibody, in cell based assays. CHA.7.518.1.H4(S241P) binds to PVRIG with high affinity and specificity, and blocks the interaction of PVRIG with PVRL2. In order to understand the effects of CHA.7.518.1.H4(S241P) on T cell function, we examined the effect of CHA.7.518.1.H4(S241P) on cytokines production in an in vitro assay. This assay was designed based on the 2 signal hypothesis of T cell activation: signal 1 comes from the activation of the T cell receptor; signal 2 are immunomodulatory receptors that help to enhance or inhibit the T cell responses. The design of these assays consist of a co-culture of human T cells with a target cell line pulsed with antigen peptide derived from a viral antigen (CMV). This signal provides “signal 1” of T cell activation through the T cell receptor. These target cell lines express endogenous PVRL2, and in this context PVRL2 provides “signal 2” to the T cell.

### CMV: Tumor Cell Line Assay

[0748] CMVpp65-reactive T cells were expanded by thawing CMV-reactive donors according to CTL “Thawing Cryopreserved PBMC” protocol and 2e6 cells/ml were resuspended in medium (Gibco) supplemented with 1% glutamax (Gibco), 1% NEAA, penicillin/streptomycin (Gibco), 10% human AB serum (Corning), 1 μg/ml CMV peptide, 2 ng/ml IL-2 (R&D), and 10 ng/ml IL-7 (R&D). PBMCs were cultured for eight days with IL-2 and IL-7 replenished at day three and day six. At Day 8, cells were harvested, and replated in low dose IL-2 (100U/ml) at 2e6/ml in complete RPMI media for 5 days. At day nine, cells are phenotyped for CD8+ T cell purity and CMV tetramer reactivity. Cells were stained with 0.25 μL of CD3(clone: OKT)-allophycocyanin seven (APC-Cy7; Biolegend), 0.25 μl of CD8 (clone: H1T8a)-Alexafluor 488 (AF488; Biolegend), 0.125 μL of CD14 (clone: HCD14), 0.5 μl of CD19 (clone:HIBCD14), 0.5 μl of CD56 (clone:HCD56)-peridinin chlorophyll protein (PerCP; Biolegend), 1.25 μl μL of TIGIT (clone:MBSA43)-allophycocyanin (APC; e-Bioscience) or 1.25 μL of IgG4(In house)-isotype control (APC:Biolegend), 25 μl of CHA7.518.1.H4(S241P)-allophycocyanin (In house), or 125 μL of IgG4-APC isotype control (In house) and 0.5 μl of PD-1 (clone: EH12.2H7)-Brilliant Violet 421 (BV421; Biolegend) or 1.25 μl of IgG1 (clone: MOPC21)-Brilliant Violet 421 (BV421; Biolegend). To assess the frequency of tetramer-reactive CD8⁺ T cells, unlabeled PBMCs were stained after cultivation) with 10 μL of iTAg Tetramer-HLA-A*02:01 CMV pp65 (NLVPMVATV)-phycoerythrin (PE, MBL-BION) for 30 min at room temperature. Cells were washed with PBS/BSA/azide solution and resuspended in buffer). Data was acquired using a Fortessa, and analyzed using FlowJo (Treestar) and Prism (Graphpad) software.

[0749] The target cells used in the co-culture assay were Panc.05.4 and Colo205 cell lines (ATCC). These cell lines were stained with 1.25 μl of PVR(SKII.4)-phycoerythrin (PE, Biolegend), 1.25 μl of PVRL2 (TX31)-peridinin chlorophyll protein (PerCP5.5; Biolegend), 2.5 μl PD-L1(29E.2A3)-Brilliant Violet 785 (BV785; Biolegend) and 1.25 μl of HLA-A2 (BB7.2)-allophycocyanin(APC; Biolegend) expression. 1.25 μl of the corresponding isotype for each flurophore was also assessed (MOPC-21).

[0750] To setup the co-culture, tumor cell lines were harvested from culture and tumor cell lines pulsed with CMV peptide (Anaspec) for 1 hour at 37° C. with periodic mixing. After the incubation, the target cells were thoroughly washed, counted, and re-suspended in complete RPMI medium. The assays were set up with a 1:1 ratio of T cells (100,000) to target cells (100,000). The target cells, T cells and 10 μg/ml of each antibody treatment were added together in a 96-well U bottom plate (Costar), and incubated for 24 hrs at 37° C. The antibody treatments include, CHA.7.518.1.H4(S241P) hIgG4, anti-TIGIT hIgG4 (Benchmark 26, Compugen), Anti-PD-1 hIgG4 (Benchmark 3, Compugen) and a human IgG4 isotype control (Compugen). In order to match the total antibody concentration across all individual and combination groups, additional human IgG4 isotype control was added in to single or double combination conditions to a final total antibody concentration of 30 μg/ml. After the 24 hr incubation period, co-culture supernatants were analyzed for secreted cytokines, including IL-2, IL-4, IL-5, IL-6, IL-9, IL-10, IL-13, IL-17A, IL-17F, IL-21, IL-22, TNF-α, and/or IFN-γ, with the cytometric bead array (CBA) human Th1/Th2/Th17 cytokine kit (BD Biosciences), or with the LEGENDplex™ Human Th cytokine kit (BioLegend). Data was acquired using a Fortessa, and analyzed using FlowJo (Treestar) and Prism (Graphpad) software

### 1. Results and Discussion

### a. CMV T Cell Assay: CMVpp65 Reactive T Cells Express PVRIG, TIGIT, and PD1

[0751] Human cytomegalovirus (CMV) is a widespread persistent β-herpesvirus that infects a high percentage of the population, with slightly lower seroprevalance in Western Europe and the United States (Cannon M J et al. 2010). The immune system of patients with chronic viral infections or cancer is often impaired in function and is unable to mount an effective response against the virus or to recognize and eliminate malignant cells. In these patients, expression of inhibitory receptors increase and this was found to be associated with T-cell dysfunction. Thus, the upregulation of negative checkpoints receptors may serve as potential targets for the reversal of T cell exhaustion. CD8 T cells specific to CMV pp65 protein have been well characterized and these CMV specific T cells can be used to study the role of modulatory receptors on T cells.

[0752] Stimulation of HLA-A2+ donor PBMCs using CMV pp65 peptide, IL-2 and IL-7 resulted in a strong expansion of CMV pp65-specific T cells to purities ranging from 50-90% as determined by tetramer staining. FIG. 8A shows the percentage of CMV pp65 specific T cells from several donors after expansion. The surface expression of PVRIG, TIGIT and PD-1 on T cells was assessed from CMV+ donors, and compared to respective isotype for receptor expression by flow cytometry. CMV pp65 specific T cells expressed PVRIG (median gMFI ratio: 7), TIGIT (median gMFI ratio: 37), and PD1 (median gMFI ratio: 2) on day 9 of activation (FIG. 8B).

[0753] We further assessed the kinetics of expression of PVRIG, TIGIT, and PD1 relative to the expansion of CMV pp65 specific T cells in a time course. For each donor, the frequency of CMVpp65 reactive CD8+ T cells are plotted over time (FIG. 9A). A significant expansion in the frequency of CMVpp65 reactive T cells (range: 50-97%) was observed in all donors, with donor 198 initially expanding at day three (Day 3 CMV+percentage: 85.7%). However, donor 198 had a loss of CMV tetramer expression at day 6 (Day 6 CMV+percentage: 50.4%). PVRIG, TIGIT and PD-1 expression of CMV-specific CD8⁺ T cells was assessed by flow cytometry over the twelve-day time course. In donor 4, donor 198 and donor 210, TIGIT expression among CMVpp65 specific CD8⁺ T cells increased during the twelve-day expansion period (mean gMFIr expression of three donors TIGIT expression of three donors, Day 0 gMFIr: 1.2, Day 12 gMFIr: 47) (FIG. 9B). PVRIG expression of CMV+ T cells also increased (mean gMFI PVRIG of three donors, Day 0 gMFIr: 0.92, Day 12 gMFIr: 8.6) (FIG. 6C). PD-1 expression was also assessed, and we observed minimal induction of expression (mean gMFIr PD-1, Day 0 gMFI: 0.93, Day 12 gMFI: 2) (FIG. 9C).

### b. CHA.7.518.1.H4(S241P), Anti-TIGIT, and Anti-PD1 Antibodies Enhanced IFN-γ Secretion

[0754] With the rationale that the upregulation of TIGIT, PVRIG, and PD-1 expression by CD8 CMV cells correlates with T cell dysfunction, we aimed to evaluate the effects of PVRIG, TIGIT, and PD-1 blockade on the capacity for pro-inflammatory cytokine production. CMVpp65 reactive T cells from 2 donors were co-cultured with CMV peptide loaded PD-L1hi (Panc04.05) and PD-L1lo (Colo205) tumor cell lines prior to flow cytometric analysis of cytokine production (FIG. 10).

[0755] In the Panc.04.05 (PD-L1hi) co-culture, we observed that anti-TIGIT single blockade increased IFN-γ production compared with IgG control mAbs, whereas CHA.7.518.1.H4(S241P) or anti-PD-1 had minimal effect (FIG. 11). Dual anti-TIGIT and CHA.7.518.1.H4(S241P) blockade synergistically and consistently increased the cytokine production of CD8+ T cells as compared with CHA.7.518.1.H4(S241P) or anti-TIGIT single blockade alone. In donor 4, a further increase in IFN-γ was observed with a triple combination of CHA.7.518.1.H4(S241P), anti-TIGIT, and anti-PD-1, suggesting that when PD-L1, PVR, and PVRL2 are expressed at high levels on tumor cells, the largest increase in T cell activation is achieved with a triple combination. In Colo205 (PD-L1lo) co-cultures, anti-TIGIT blockade alone increased IFN-γ secretion whereas CHA.7.518.1.H4(S241P) or anti-PD1 antibody had minimal effect, similar to the results with Panc.04.05 co-culture. Also similar to the Panc.04.05 co-culture, dual blockade of anti-TIGIT and CHA.7.518.1.H4(S241P) also synergistically increased IFN-γ as compared anti-TIGIT, anti-PD-1, or CHA.7.518.1.H4(S241P) alone, and to a greater magnitude of either CHA.7.518.1.H4(S241P) or anti-TIGIT in combination with anti-PD-1. In contrast to Panc.04.05 (PD-L1hi), the triple combination condition for Donor 4 was not better than the dual combination of CHA.7.518.1.H4(S241P) and anti-TIGIT in the Colo205 co-culture (PD-L1lo), suggesting when PVR and PVRL2 are expressed at high levels and PD-L1 at a low level on tumor cells, double combination CHA.7.518.1.H4(S241P) and anti-TIGIT led to the greatest increase of IFN-γ expression. These findings demonstrate that TIGIT and PVRIG blockade were sufficient to enhance CD8+ T cell responses in PD-L1lo tumors and that a triple combination led to the greatest increase in T cell activation in PD-L1hi tumors.

### c. Summary

[0756] Human anti-CMV T cell responses are utilized as an in-vitro antigen-specific method to assess checkpoint inhibitor antibody functional capability. We observed that co-blockade of TIGIT and CHA.7.518.1.H4(S241P) lead to a greater restoration of T cell function compared with a single antibody blockade, suggesting that disrupting the TIGIT and PVRIG pathway may be more important that disrupting the PD1 pathway in CD8-tumor cell co-cultures. Furthermore, we observed that triple blockade using antibodies to PD-1, TIGIT, and PVRIG can result in the greatest increase in IFN-γ when PD-L1 positive tumor cells or immune cells are >1%, which is equivalent to PD-L1 high expression levels. These findings demonstrate that TIGIT and PVRIG blockade were sufficient to enhance CD8+ T cell responses in PD-L1lo tumors and that a triple combination led to the greatest increase in T cell activation in PD-L1hi tumors.

[0757] The present invention provides methods comprising: a) providing a cell population from a tumor sample from a patient; b) staining said population with labeled antibodies that bind: i) TIGIT protein; ii) PVRIG protein; iii) PVR protein; iv) PD-1 protein; v) PD-L1 protein; vi) PVRL2; and vii) a relevant isotype control for the antibodies in i)-vi); c) running fluorescence activated cell sorting (FACS); d) for each of TIGIT, PVRIG, PVR, PD-1, PVRL2 and PD-L1, determining the percentage of cells in said population that express the protein relative to said isotype control antibody; wherein if the percentage of positive cells is >1% for either TIGIT or PVR, and for either PVRIG or PVRL2, and for either PD-1 or PD-L1, proceeding to step e); and e) administering antibodies to TIGIT, PVRIG, and PD-1 to said patient.

[0758] The present invention provides a method comprising: a) providing a cell population from a tumor sample from a patient; b) staining said population with labeled antibodies that bind: i) TIGIT protein; ii) PVRIG protein; iii) PVR protein; iv) PD-1 protein; v) PD-L1 protein; vi) PVRL2; and vii) a relevant isotype control for the antibodies in i)-vi); c) running fluorescence activated cell sorting (FACS); d) for each of TIGIT, PVRIG, PVR, PD-1, PVRL2 and PD-L1, determining the percentage of cells in said population that express the protein relative to said isotype control antibody; wherein if the percentage of positive cells is >1% for either TIGIT or PVR, and for either PVRIG or PVRL2, and for either PD-1 or PD-L1, proceeding to step e); and e) administering antibodies to TIGIT, PVRIG, and PD-1 to said patient.

[0759] The present invention provides a method comprising: a) providing a cell population from a tumor sample from a patient; b) staining said population with labeled antibodies that bind: i) TIGIT protein; and ii) PVR protein; and iii) a relevant isotype control for the antibodies in i)-ii); c) running fluorescence activated cell sorting (FACS); d) for each of TIGIT and PVR, determining the percentage of cells in said population that express the protein relative to said isotype control antibody; wherein if the percentage of positive cells is >1% for either TIGIT or PVR, proceeding to step e); and e) administering antibodies to TIGIT, PVRIG, and PD-1 to said patient.

[0760] The present invention provides a method comprising: a) providing a cell population from a tumor sample from a patient; b) staining said population with labeled antibodies that bind: i) PVRIG protein; and ii) PVRL2 protein; and iii) a relevant isotype control for the antibodies in i)-ii); c) running fluorescence activated cell sorting (FACS); d) for each of PVRIG and PVRL2, determining the percentage of cells in said population that express the protein relative to said isotype control antibody; wherein if the percentage of positive cells is >1% for either PVRIG or PVRL2, proceeding to step e); and e) administering antibodies to TIGIT, PVRIG, and PD-1 to said patient.

[0761] The present invention provides a method comprising: a) providing a cell population from a tumor sample from a patient; b) staining said population with labeled antibodies that bind: i) PD-1 protein; and ii) PD-L1 protein; and iii) a relevant isotype control for the antibodies in i)-ii); c) running fluorescence activated cell sorting (FACS); d) for each of PD-1 and PD-L1, determining the percentage of cells in said population that express the protein relative to said isotype control antibody; wherein if the percentage of positive cells is >1% for either PD-1 or PD-L1, proceeding to step e); and e) administering antibodies to TIGIT, PVRIG, and PD-1 to said patient.

### Example 2: Expression of PVRIG and PVRL2 in Human Cancer and Normal Adjacent Tissues

[0762] The purpose of this study was to examine the expression of PVRIG and PVRL2 in human tumor and normal adjacent samples. PVRIG was observed to be expressed highest on CD8+ T cells, followed by NK cells, CD4−CD8− T cells, and by CD4+ T cells. No expression was observed on monocytes, mDCs, pDCs, or tumor cells. Of the tumor types examined, endometrial, lung and kidney tumors expressed the highest levels of PVRIG on lymphocytes. A comparison of PVRIG expression on CD4+ and CD8+ T cells from normal adjacent tissues compared to tumor tissues from the same patient showed a significant increase in PVRIG in tumor tissues. A correlation analysis of the magnitude of PVRIG expression with the magnitude of TIGIT or PD-1 expression showed a positive and significant correlation on CD4 and CD8 T cells. In addition, a co-expression single cell analysis of PD-1, TIGIT, and PVRIG showed that PVRIG is co-expressed with PD-1 and TIGIT on a subset of cells. These data support the conclusion that combination blockade of PVRIG with TIGIT and/or PD-1 will lead to increased T cells responses. The ligand for PVRIG, PVRL2, was expressed on myeloid cells (monocytes, mDCs, pDCs) and on CD45-non-immune cells from multiple tumors, likely composed of tumor epithelium and stromal cells. A comparison of PVRL2 on cells derived from normal adjacent vs tumor tissue showed significant increase in expression of PVRL2 on monocytes and CD45-non-immune cells. A correlation analysis of the magnitude of PVRL2 expression with the magnitude of PD-L1 expression showed a positive and significant correlation on CD45-non-immune cells and monocytes. In these samples, we also assessed the co-expression of PVRIG and PVRL2 in the same sample to understand which tumor type has high co-expression of both receptor and ligands. Of the tumor types examined, we observed high expression of both PVRIG and PVRL2 in the majority of endometrial samples, kidney samples, and lung tumor samples. In summary, these data demonstrate that PVRIG and PVRL2 are expressed on leukocytes and tumor cells from the tumor microenvironment and suggest that this pathway can be exploited to regulate anti-tumor responses.

[0763] We examined the expression of PVRIG and PVRL2 using flow cytometry on cells from dissociated human tumors and matched normal adjacent tissues from multiple different tissues. The expression of immune regulators in the tumor can be used to help predict which tumor types or patients can be most responsive to a specific therapy.

[0764] Healthy human peripheral blood mononuclear cells (PBMC) donors were obtained from the Stanford Blood Bank. Buffy coats or LRS products were diluted 11 in 1×PBS+2% FBS and PBMCs were isolated by Ficoll-Paque gradient (Sigma). Purified PBMCs were washed 2× with PBS+2% FBS and banked in liquid nitrogen. Tumor and normal adjacent tissue (NAT) samples were provided by the Cooperative Human Tissue Network, a National Cancer Institute supported resource. The tumor type was determined based on reviewing the pathology report for each sample. The number of samples per tumor type where we examined PVRIG and PVRL2 expression is reported below.

| | | Colon, Rectal, | Endometrium | Head & | | | | |
|---|---|---|---|---|---|---|---|---|
| Target | Breast | Stomach | & Uterine | Neck | Kidney | Lung | Prostate | Ovary |
| PVRIG | 4 | 15 | 24 | 4 | 14 | 8 | 9 | 5 |
| PVPL2 | 6 | 21 | 28 | 5 | 16 | 11 | 12 | 10 |

### 1. Tumor Dissociation Protocol

[0765] Tumor and NAT samples were cut into small pieces with a scalpel and transferred to GentleMACS™ C tubes (Miltenyi Biotec) containing an enzyme mix. Samples were dissociated on GentleMACs (Miltenyi Biotec) as per the manufacturer's protocol. After dissociation, cells were filtered through a 1B0 m filter prior to FACS staining.

### 2. Antibodies and Reagents

[0766] To identify immune and non-immune cell populations, the following antibodies were at the manufacturer's recommended concentrations:

TABLE 2
The antibodies used to identify specific cell subsets is shown.

| Antibody | Flourophore | Clone | Vendor | Cat |
|---|---|---|---|---|
| CD45 | Alexa Fluor 700 | HI30 | BioLegend | 304024 |
| CD3 | APC Cy7 | OKT3 | BioLegend | 317342 |
| CD8 | BV 785 | RPA-T8 | BioLegend | 301046 |
| CD33 | BV711 | WM53 | BioLegend | 303424 |
| CD25 | BV 650 | BC96 | BioLegend | 302634 |
| CD127 | BV 605 | A019D5 | BioLegend | 351334 |
| CD14 | BUV395 | MoP9 | BD Pharmingen | 563562 |
| CD4 | BUV496 | SK3 | BD Pharmingen | 564651 |
| CD56 | PE Dazzle | HCD56 | BioLegend | 318348 |

[0767] The following antibodies were used at 5 μg/ml in the isotype control cocktail.

TABLE 3
The antibodies used as isotype controls
for the targets of interest is shown.

| Antibody | Flourophore | Clone | Vendor | Cat |
|---|---|---|---|---|
| mlgG1 | AF647 | in house | Compugen | In-house |
| hlgG4 | PE | in house | Compugen | In-house |
| mlgG1 | BV421 | MOPC21 | BioLegend | 400158 |
| mlgG1 | PerCP Cy5-5 | MOPC21 | BioLegend | 400150 |
| mlgG1 | PE Cy7 | MOPC21 | BioLegend | 400126 |
| mlgG1 | FITC | MOPC21 | BioLegend | 400110 |

[0768] The following cocktail was used to stain the targets of interest at 5 μg/ml:

TABLE 4
The antibodies used to analyze the targets of interest are shown

| Antibody | Flourophore | Clone | Vendor | Cat |
|---|---|---|---|---|
| PDL1 | AF647 | BM1 (M1) | Compugen | In-house |
| PVRIG | PE | 518 (H4) | BioLegend | 93930 |
| PD1 | BV421 | EH12.2H7 | BioLegend | 329920 |
| | | (M1) | | |
| PVR | PerCP Cy5-5 | SKII.4 (M1) | BioLegend | 337612 |
| PVRL2 | PE Cy7 | TX31 (M1) | BioLegend | 337414 |
| TIGIT | FITC | MBSA43 (M1) | eBioscience | 11-9500-42 |

[0769] All isotype control antibodies and target antibodies were used at 5 μg/ml final concentration.

### 3. FACS Staining

[0770] 1×10⁶ cells of PBMCs or dissociated tumor cells were seed into a 96-well V-bottomed plate for staining. Samples were first stained with Aqua Live Dead (Thermo Scientific) to distinguish live cells from dead cells and with a cocktail of anti-CD16 (Biolegend), anti-CD32 (Thermo Scientific), anti-CD64 (Biolegend) Abs to block Fc receptors. Samples were washed twice with FACS buffer and stained with a relevant isotype control for the antibodies for the antibodies used or a target antibody cocktail described in the “Antibodies and Reagents” section. All staining was done for 30 minutes at 4 C. Samples were then washed twice and acquired on the BD Fortessa flow cytometer. Analysis was done using FlowJo, gating on specific populations as specified in Table 1, above (all gated on live cells).

[0771] From each population with at least 100 cells, MFI values were exported and a MFI ratio (MFIr) calculated by dividing the MFI of a target by the MFI of the relevant isotype control. MFIr value greater than one denotes positive expression detected.

### 4. Results and Discussion

### a. PVRIG is Expressed on TILS from Multiple Tumor Types and is Co-Expressed with TIGIT and PD1

[0772] To examine the expression of PVRIG on cells derived from tumors by flow cytometry, tumors were dissociated and stained for immune cell lineage markers to identify immune and non-immune cell subsets and for PVRIG, TIGIT, PD1, PVRL2, and PVR to examine expression of these targets on these subsets. Expression of PVRIG was detected on CD4⁺ T cells, CD8⁺ T cells, CD4⁻CD8⁻ T cells, and NK cells from breast, colon/rectal/stomach, endometrium, head & neck, lung, kidney, prostate, and ovarian tumors (FIG. 12A). Across all tumor tissues examined, PVRIG was expressed, from highest to lowest, on CD8⁺ T cells, NK Cells, CD4⁻CD8⁻ T cells, and CD4⁺ T cells. No PVRIG expression was detected on monocytes, mDCs, pDCs, or non-immune cells (FIG. 1). As CD8⁺ T cells and NK cells are known to be important cytotoxic lymphocytes within the immune system, this suggests the PVRIG can directly modulate the activity of these cytotoxic lymphocytes.

[0773] We next examined the expression of magnitude of PVRIG in relation to the magnitude of TIGIT and PD-1 on tumor infiltrating T cells. For this analysis, we focused the analysis on endometrial samples because we had sufficient number of samples with which to perform the correlation analysis. PVRIG significantly and directly correlated with TIGIT and PD1 expression on both CD4 and CD8 T cells, suggesting that these molecules are co-regulated within the TME (FIG. 13).

[0774] We further examined co-expression of PVRIG, TIGIT, and PD1 on a single cell basis on CD8 T cells. Co-expression of PVRIG with PD-1 and with TIGIT was observed on a representative lung and kidney cancer (FIG. 14).

### b. PVRIG Expression is Significantly Enhanced on T Cells from the Tumor Versus Normal Adjacent Tissue

[0775] For a subset of colon/rectal/stomach, endometrium, kidney, lung or ovarian tumors, we were able to obtain matched tumor and normal adjacent tumor (NAT) samples from the same donor. Using these matched samples, we compared the expression of PVRIG and PD1 on cells derived from NAT or tumor samples to determine if there is modulated expression in the tumor compared to healthy tissues (FIG. 15). Overall, PVRIG was significantly increased on CD4 and CD8 T cells derived from tumor tissue as compared to matched normal adjacent (FIG. 15A). Within tumor types, PVRIG was upregulated by at least 2 fold in 3 of 9 colon tumors, 1 or 2 endometrium tumors, 4 of 11 kidney tumors, and 4 of 5 lung tumors (FIG. 15A). In the same samples, we also evaluated PD-1 expression. A correlation analysis between PVRIG fold change (between NAT and tumor) and PD-1 fold change on CD4 and CD8 T cells showed a positive and significant correlation in these samples, suggesting that these molecules could be co-regulated in similar manner in the tumor.

### c. PVRL2 is Expressed on Myeloid and CD45-(Non-Immune) Cells from Multiple Tumors

[0776] In the same samples from which we examined PVRIG expression, we also examined the expression of PVRL2, the ligand for PVRIG. PVRL2 expression was detected on 2 major cell subsets, myeloid cells which include monocytes, mDC, and pDC populations, and CD45-non-immune cells, likely composed of tumor epithelium, stromal cells, and endothelial cells (FIG. 16).

[0777] PVRL2 expression on CD45-non-immune cells was detected on cells from breast, colon/rectum/stomach, endometrial, lung, prostate, and ovarian tumors (FIG. 17). The highest expression median expression of PVRL2 was detected on endometrium and ovarian tumors.

[0778] On immune cells, PVRL2 was expressed on myeloid cells from breast, colon/rectum/stomach, endometrium/uterus, head and neck, lung, kidney, prostate, and ovary tissues.

[0779] FIG. 18). The median expression of PVRL2 on myeloid cells (monocytes, mDCs, pDCs) was comparable across tumor types.

[0780] Comparing tumor tissue with normal adjacent tissue, PVRL2 expression was significantly increased on tumor CD45-cells or on monocytes from tumor tissues (FIG. 19). PVRL2 expression on monocytes or CD45-cells was induced by at least 2 fold in the tumor compared to normal adjacent in 5 of 9 colon tumors, 1 of 2 endometrium tumors, 5 of 11 kidney tumors, 4 of 5 lung tumors, and 1 of 1 ovarian tumors. These data support increased expression of PVLR2 on tumor cells and on immune cells within the tumor. A correlation analysis between of PVRL2 fold change (between NAT and tumor) and PD-L1 fold change on CD45-cells and monocytes showed a positive and significant correlation in these samples, suggesting that these molecules could be co-regulated in similar manner in the tumor.

### d. PVRIG and PVRL2 are Co-Expressed in the Same Tumor

[0781] We further assessed which tumor types have high expression of both PVRIG on T cells and PVRL2 on either monocytes and tumor cells. In this sample set, tumors from endometrium, lung, and kidney tissues displayed high expression of both PVRIG on T cells and PVRL2 on either monocytes or CD45-cells (FIG. 20), suggesting that these tumor types may be more responsive to CHA.7.518.1.H4(S241P) treatment.

### e. Conclusion

[0782] The results from these studies demonstrate that PVRIG is expressed on effector lymphocytes such as CD8 T cells and NK cells within the tumor microenvironment.

[0783] Both PVRIG and PVRL2 were expressed in multiple tumor samples from breast, colon/rectum/stomach, endometrial, lung, prostate, and ovarian tumors. Expression of PVRIG on T cells was significantly increased in tumor tissues as compared to matched normal adjacent tissues. Furthermore, a significant direct correlation was observed between PVRIG and PD-1 and PVRIG and TIGIT expression on CD4 and CD8 T cells from endometrial samples. On a single cell basis, co-expression of PVRIG with PD1 or with TIGIT was observed on CD8 T cells. The ligand for PVRIG, PVRL2, is expressed on antigen presenting cells (monocytes, mDCs, pDCs) and also on CD45-cells (presumably composed of epithelial, stromal, endothelial cells) from multiple tumor tissues. Induction of PVRL2 expression was detected on cells derived from tumor as compared with normal adjacent tissues. The cellular expression profile of the receptor and ligand suggest a role for this pathway in regulating effector lymphocyte responses for multiple tumor types.

### Example 3: Expression of PVRL2 and PD-L1 in Human Cancer and Normal Tissues by IHC

[0784] The purpose of this study was to examine the expression of PVRL2 and PD-L1 in human healthy and cancer tissue. Two antibodies to PVRL2 were identified to stain for PVRL2 in formalin fixed paraffin embedded (FFPE) fixed samples. PD-L1 was assessed using a commercially validated antibody. Using these antibodies, we examined expression of PVRL2 and PD-L1 in serial tissue sections of a tumor microarray (TMA) composed of breast, colon, lung, ovarian, and skin tissues. PVRL2 expression was observed to be enhanced in breast, colon, lung, ovarian, and skin cancers as compared to healthy tissues. Similar staining was observed between the two PVRL2 antibodies, helping to corroborate the results obtained. PD-L1 expression was also increased in breast, colon, lung, ovarian, and skin cancers as compared to healthy tissues. Expression of PVRL2 was observed on tumor epithelium and also on infiltrating immune cells. There was a higher incidence of PVRL2 expression than PD-L1 expression in these tumor samples. Individual tumor samples were further grouped by PD-L1 negative and positive expression, and PVRL2 expression analyzed in these subgroups. All PD-L1 positive tumors also expressed PVRL2, providing a rationale for combination treatment in tumors. In PD-L1 negative tumors, PVRL2 expression was detected in a subset of these samples, providing a rationale for targeting the PVRL2 pathway in PD-L1 negative tumors. Taken together, these data demonstrate that PVRL2 expression was enhanced in the tumor microenvironment from breast, colon, lung, ovarian, and skin cancer and provide a rationale for monotherapy and combination treatment with agents targeting the PVRL2 pathway.

### Protocols

### Antibodies

[0785] Anti-PVRL2 (Abcam ab135246, Sigma HPA-012759) and anti-PDL1 (SpringBio Sp142) were used in this study. Isotype control antibody (Rabbit IgG) was used as the negative control.

### IHC Staining

[0786] Breast, colon, lung, ovarian, skin tumor microarrays were obtained from. Each microarray contains healthy tissues from 2-4 donors and tumor tissue from 30-40 donors, present in duplicates on the slide. Anti-PVRL2 Abcam ab135246 staining was performed at 1:250 dilution with no heat-induced antigen retrieval (HIER). Anti-PVRL2 (Sigma HPA-012759) was used at 0.1 ug/ml with HIER at pH 9.5. Anti-PD-L1 (SpringBio SP142) was used at 1 μg/ml with HIER at pH6.2 based on the manufacturer's recommendation. A matching rabbit IgG isotype control was used at each of the relevant conditions. Each core was qualitatively scored based on: No staining (score 0), partial positive (score 1), positive (score 2), strong positive (score 3) by 2 individual operators. In cases of a score discrepancy between the 2 operators, the sample was reassessed by both operators for a final score. The score from the 2 cores derived from the same tumor were averaged and one score obtained for each tumor. Scores were plotted and samples were grouped by pathology data provided by the vendor.

### Results and Discussion

### PVRL2 and PD-L1 Expression are Increased in Breast, Colon, Lung, Ovarian, and Skin Cancers

[0787] Two anti-PVRL2 antibodies (ab135246, HPA-012759) were tested for ability to assess PVRL2 expression in formalin fixed paraffin embedded tissues. Expression of PVRL2 and PD-L1 was assessed serial sections of a tumor microarray of breast, colon, lung, ovarian and skin cancers. Expression of PVRL2 and PD-L1 was increased in breast, colon, lung, ovarian, and skin cancers (FIG. 21).

### PVRL2 is Expressed in PD-L1 Positive and PD-L1 Negative Tumors.

[0788] As the expression of PVRL2 and PD-L1 was conducted on serial sections of the same TMA, we were able to examine the expression of PVRL2 and PD-L1 in each of these tumors from the same portion of the tumor (FIG. 22). A subset of PD-L1 negative tumor samples, in particular lung, ovarian, breast tumors, expressed PVRL2 (as defined by at least partial positive) as detected by both anti-PVRL2 antibodies. These data show that PVRL2 can be expressed in PD-L1 negative tumors. In contrast, all PD-L1 positive tumors expressed PVRL2 as detected by both PVRL2 antibodies.

### PVRL2 is Expressed on the Epithelial Cells and on the Immune Compartment on the Invasive Front

[0789] The spatial expression of immune checkpoints at the invasive front of a tumor is important in regulating the anti-tumor response. Known checkpoint targets such as PD-1 and PD-L1 have prominent expression at the invasive front. As these TMAs are generated from punch biopsies and do not contain the whole tumor, we examined these samples for the presence of immune infiltrate at the invasive front of the tumor. We identified 1 sample where we observed PVRL2 expression in the immune infiltrate and on the tumor epithelium (FIG. 23). PD-L1 expression was observed on the immune infiltrate, further suggesting this could be the invasive front of a tumor.

### CONCLUSION

[0790] These results demonstrate the PVRL2 expression is enhanced in breast, colon, lung, ovarian, skin tumors as compared to healthy tissue from the same organs. PVRL2 is expressed on both tumor epithelium and on infiltrating leukocytes. We further demonstrate that all PD-L1 positive tumors express PVRL2, suggesting that agents that target PVRL2 pathway may be efficacious in combination with PD-1/PD-L1 inhibitors. In addition, PVRL2 expression was detected in PD-L1 negative tumors, suggesting that agents that target PVRL2 pathway may be efficacious in PD-L1 negative tumors.

### Example 4: Antitumor Responses of Mono, Dual and Triple Combination Antibody Treatments in the CT26 Tumor Model

### Rationale and Objectives

[0791] To examine whether antibody blockade of PVRIG, TIGIT and PD-L1 can enhance tumor growth inhibition and survival in a syngeneic mouse tumor model compared to mono or dual antibody treatments.

### Materials and Methods

### In Vivo Tumor Model

[0792] CT26 colon carcinoma cells (ATCC) were cultured in RPMI 1640 with 10% FBS, and 100 μg/mL penicillin/streptomycin. For tumor implantation, 5×10⁵ CT26 cells were injected subcutaneously into the right flank of female, 8-week-old BALB/c mice. Following tumor randomization, the antibodies were administered by intra-peritoneal (i.p.) injection, starting on day 7 post tumor inoculation when tumors reached the volume of 60-90 mm³, and continued for 3 weeks for a total of 6 administrations. Tumor size was measured with electronic caliper every 2-3 days and was reported as 0.5×W²×L mm³. Mice were sacrificed at either study termination or at the clinical endpoints, including tumor volume≥3250 mm³, tumor ulceration, body weight loss≥20%, or moribund appearance.

### Antibodies

[0793] The chimeric anti-mouse PVRIG antibody (Clone 407, internal production) used in these studies was engineered as a mouse IgG1 (mIgG1) antibody. This antibody was shown to bind to 293HEK cells over-expressing mouse PVRIG, and to block the binding of the ligand, mouse PVRL2. The anti-mouse PD-L1 mIgG1 antibody (Clone YW243.55.S70) was generated according to the description in WO/2010/077634. The anti-mouse TIGIT mIgG1 antibody (Clone 11A11) was generated according to the description in WO2016/028656. Synagis IgG1 was used as isotype control and produced internally. Antibodies were formulated in sterile PBS with low endotoxin (<0.05 EU/mg). The anti-PVRIG antibody was administered at a dose of 10 mg/kg, anti-PD-L1 at 5 mg/kg, and anti-TIGIT at 18 mg/kg.

### Statistical Analysis

[0794] Two-way ANOVA with repeated measures, followed by two-way ANOVA with repeated measures for selected pairs of groups was determined by JUMP software (Statistical Discoveries™). Analyses of tumor growth measurements were performed by comparing tumor volumes measured on the last day on which all study animals were alive. Statistical differences in percentage of mice tumor free were determined by a Log Rank Mantel-Cox test. Values of P<0.05 were considered significant. * p<0.05; ** p<0.01; *** p<0.001.

### Results

In Vivo Efficacy of Anti-TIGIT and Anti-PVRIG Antibodies in Combination with Anti-PD-L1 Antibody

[0795] The in vivo efficacy of combinational therapy of mouse PVRIG, TIGIT and PD-L1 blockade was evaluated in mouse syngeneic CT26.WT ectopic subcutaneous tumor model. Treating tumor bearing mice with the anti-PVRIG antibody in combination with an anti-PD-L1 antibody resulted in tumor growth inhibition (TGI) of 47% compared to isotype control. However, in this study no benefit was observed with the dual combination of anti-PD-L1 and anti-PVRIG antibodies compared to anti-PD-L1 antibody treatment alone. The blockade of TIGIT in the triple combination (anti-PVRIG, anti-TIGIT and anti-PD-L1) resulted in a significant improvement in TGI when compared to other dual combination treatments with the anti-TIGIT antibody (anti-PDL-1+anti-TIGIT, anti-PVRIG+anti-TIGIT, and anti-PDL-1+anti-TIGIT, which corresponded to 29%, 61%, and 55% TGI, respectively) (FIGS. 24A and C). The triple combination resulted in higher response rates (55% vs 40%) and promoted durable antitumor activity with a trend for higher survival rate until Day 35 (FIG. 24B).

### Example 5: PVRIG Antagonism Enhances T Cell Effector Function and Reduces Tumor Growth

### Abstract

[0796] Despite recent advances, the majority of patients do not derive long term benefit from checkpoint inhibitors. PVRIG is a novel immune suppressive receptor of the DNAM/TIGIT family and we demonstrate here a role of PVRIG in regulating anti-tumor responses. PVRIG binds to PVRL2 and displays significantly enhanced expression on tumor infiltrating lymphocytes as compared to lymphocytes from normal tissues. PVRIG antagonism enhanced human T cell activation and combination of PVRIG with PD-1 or TIGIT inhibitors further synergistically increased lymphocyte function. We next addressed the role of PVRIG in preclinical tumor models. PVRIG^{-/-} mice displayed significantly increased T cell activation in vitro and reduced MC38 tumor growth that was mediated by increased CD8 effector function. Antagonistic anti-PVRIG antibody significantly reduced tumor growth in combination with anti-PD-L1 or when tested in TIGIT^{-/-} mice. In summary, we demonstrate that PVRIG-PVRL2 pathway was induced in human cancers and that antagonizing PVRIG-PVRL2 interactions resulted in increased T cell function and reduced tumor growth.

### State of Significance

[0797] These data demonstrate that PVRIG is a promising target for the treatment of cancer and provide the rationale for testing a PVRIG inhibitor, CHA.7.518.1.H4(S241P), as a novel cancer immunotherapy agent either as monotherapy or in combination with TIGIT or PD1 blockade.

### INTRODUCTION

[0798] Increasing evidence demonstrate that endogenous immune responses are critical in sculpting the initiation, progression, and suppression of cancer (1) (2). The immune status of patients as well as the content of tumor-infiltrating leukocytes (TILs) within the tumor microenvironment (TME) are key prognostic indicators of not only cancer survival rates, but also how patients respond to therapy (3) (4). T cells are a key component of TILs that can invoke an anti-tumor response, and most anti-tumor immune responses ultimately rely on the functionality of effector lymphocytes cells. An enrichment of CD8 T cells in the TME of a patient's tumor, as well as other factors that bias an immune response towards an effective CD8 T cell response such as mutational load and a Th1 polarized TME, are all key prognostic indicators for a favorable anti-tumor immune response (5) (6).

[0799] A key observation across many solid tumors is that effector T cells have an activated or ‘exhausted’ phenotype within the TME (7). This indicates that although T cells within the TME have initially seen cognate antigen, been activated, and trafficked to the tumor, they are subsequently not capable of invoking an effective anti-tumor response. Pre-activated or exhausted T cells are defined by increased surface expression of co-inhibitory receptors, such as PD-1 and CTLA-4 (8). Therapeutically targeting these co-inhibitory receptors with antibodies that inhibit interactions with their cognate ligands have shown remarkable clinical efficacy in patients with multiple advanced cancers (9). Mechanistically, it has been shown that targeting these co-inhibitory receptors leads to the expansion of already tumor-reactive T cells that pre-exist in the TME and to the production of T cell pools with widened T cell receptor diversity (10) (11) (12). Although checkpoint inhibitors currently in the clinic have revolutionized cancer treatment and demonstrated the power of the immune system in combating cancer, many patients still relapse and/or do not respond to treatment. Consequently, increased understanding of the immune response in cancer and targeting additional immune-based pathways will lead to additional therapeutic treatments.

[0800] Among these novel pathways, a group of receptors and ligands within the nectin and nectin-like family are currently under investigation as potential novel cancer immunotherapies. Receptors within this family include DNAM-1 (CD226), CD96 (TACTILE), TIGIT, and more recently, PVRIG (CD112R) (13) (14) (15). Of these molecules, DNAM is an activating receptor within this subfamily, binding to 2 ligands, PVR (CD155) and PVRL2 (CD112), to deliver an activating signal to lymphocytes (16). Two receptors in this family have been shown to inhibit human lymphocyte function, TIGIT, and more recently, PVRIG (17) (18). TIGIT is reported to have a high affinity interaction with PVR, a much weaker affinity to PVRL2, and has been shown to inhibit both T cell and NK cell responses by delivering an inhibitory signal into lymphocytes through its ITSM motif (19) (20). More recently, PVRIG was shown to bind with high affinity to PVRL2 and to deliver an inhibitory signal through its ITIM motif (15). In both cases, the affinity of TIGIT to PVR and of PVRIG to PVRL2 is higher than the affinity of DNAM to either PVR or PVRL2, suggesting TIGIT and PVRIG can outcompete PVR and PVRL2 from DNAM, providing an indirect mechanism by which TIGIT and PVRIG can reduce T cell function. Within this family, PVR is also a ligand for CD96. The function of CD96 has been reported to be inhibitory on mouse lymphocytes (21) but activating on human lymphocytes (22). Based on these data, we postulate on human lymphocytes that 2 receptors, TIGIT and PVRIG, bind with high affinity to PVR and PVRL2, respectively, to deliver inhibitory signals to dampen T cell function.

[0801] Although human PVRIG has been shown to inhibit T cells response in one recent report, the role of PVRIG and PVRL2 in cancer immune surveillance is not well understood. In particular, the expression profile of this pathway in cancers and the role of PVRIG in regulating CD8 T cell anti-tumor responses has not been reported. Furthermore, functional characterization of the mouse PVRIG gene and the effect of disrupting PVRIG-PVRL2 interaction in vivo in pre-clinical tumor models has not been reported. Herein, we elucidated the role of PVRIG in a cancer setting by reporting on PVRIG and PVRL2 expression profile in cancer and the effect of PVRIG antagonism in tumor cell co-culture assays and in preclinical tumor models. We demonstrate that PVRIG has a differentiated expression profile on T cell subsets compared to TIGIT or CD96 and that PVRIG and PVRL2 expression were induced in cancer compared to normal adjacent tissues. In multiple human in vitro assay systems, a high-affinity PVRIG antagonistic monoclonal antibody (CHA.7.518.1.H4(S241P)) enhanced T cell function, in particular when combined with anti-TIGIT or anti-PD1 antibody. In addition, we report the novel characterization of mouse PVRIG using antagonistic antibodies or PVRIG deficient mice and demonstrate that inhibition of PVRIG-PVRL2 interaction reduced tumor growth, with most potent effects in combination with PD-1 inhibition or TIGIT genetic deficiency. Collectively, this data shows that PVRIG is a critical inhibitory receptor in regulating T cell anti-tumor responses and support the development of CHA.7.518.1.H4(S241P), for clinical testing in cancer patients.

### Materials and Methods

### Human Peripheral Blood and Tumor Expression Studies

[0802] Healthy donor human PBMCs were obtained from Stanford University in accordance with the Declaration of Helsinki. Human tissues were provided by the Cooperative Human Tissue Network, a National Cancer Institute supported resource. Human cancer tissue and matched normal adjacent tissues were dissociated into single cells as per manufacturer's protocol (Miltenyi Biotec). Dissociated cells were analyzed by flow cytometry for expression of various targets on different cell subsets. For each target expression on an individual cell subset, a fold expression value was calculated by taking the MFI value of target divided by the MFI value of the isotype control. Other investigators may have received samples from these same tissue specimens. The tumor type was determined based on reviewing the pathology report for each sample. For I-IC studies, anti-PVRL2 antibody (HPA-012759, Sigma) and PD-L1 (Sp142, SpringBio) were used to stain tumor micro-arrays (Biochain institute) using conditions as described in the supplemental methods. Scoring was performed by 2 independent reviewers on duplicate cores from the same tumor.

### PVRIG Antibody Generation and Characterization

[0803] Anti-human PVRIG and anti-mouse PVRIG antibodies were generated as detailed in the supplemental methods. Briefly, antibody binding specificity and affinity were assessed by selective binding to PV-RIG engineered cells with no detectable binding to cells that do no express the gene. Antagonistic activity of these anti-PVRIG antibodies was determined using ELISA and FACS based assays in which the interaction of PVRIG with PVRL2 was disrupted. For characterization in cell based assays, antibodies were tested in several T cell-target cell co-culture assay systems consisting of target cells that express PVRL2 in culture with PBMC or tumor-derived T cells. gp100 specific T cells lines were expanded from melanoma tumors as previously described (23). CMVpp65 reactive T cells were expanded from healthy donor PBMCs (CTL immunospot) with CMVpp65 (495-503), IL-2, and IL-7 for 10 days. For combination studies, antibodies to PD-1, TIGIT, and PVRIG were used at 10 μg/ml. Cytokine concentrations in conditioned media was determined using Cytometric Bead Array (CBA) and FACS staining was performed as described in the supplemental methods.

### Characterization of Mouse PVRIG Expression and Function

[0804] Binding interactions of mouse PVRIG with mPVRL2 and mPVR were assessed by SPR and ELISA using recombinant PVRIG, PVRL2, and PVR proteins and by FACS using ectopically engineered PVRIG and PVRL2 overexpressing cell lines or PVR or PVRL2 siRNA transfected cell lines. PVRIG and TIGIT deficient mice were generated as described in the supplemental methods. Expression analysis was performed to examine expression of PVRIG in spleen, lymph node, and tumor in various cell subsets. Cell functional assays demonstrating a T cell modulatory activity for mouse PVRIG were established using WT and PVRIG^{-/-} T cells and PVRL2 Fc or PVRL2 ectopically expressed target cells as detailed in the supplemental materials and methods. CT26, MC38, and B16/Db-hmgp100 tumor models were performed as described in the supplemental methods. All studies were approved by the Institutional Animal Care and Use committee at the Tel-Aviv University (Tel-aviv, Israel) or Johns Hopkins University (Baltimore, USA).

### Results

### PVRIG Expression is Highest on Effector T Cells of Peripheral Blood and Tumors

[0805] The Ig superfamily (IgSF) consists of hundreds of proteins but only a few of them are T cell inhibitory receptors. Proteins of the IgSF tend to evolve quickly (24) and therefore sequence similarity among these proteins is generally low and is not optimal for identifying novel immune receptors. To identify novel immune checkpoints, we developed bioinformatic algorithms based on shared genomic and proteomic characteristics among known immune checkpoints, such as gene structure, protein domains, predicted cellular localization and expression pattern. Using these algorithms, we identified PVRIG as a novel immune receptor. A report has recently also demonstrated that human PVRIG (CD112R) binds to PVRL2 and inhibits T cell function (15). However, the relevance of this pathway in regulating tumor immune surveillance has not been reported. Here, we have elucidated the expression and function of PVRIG and PVRL2 in human cancers and preclinical tumor models. In peripheral blood from healthy donors, PVRIG was expressed exclusively on lymphocytes, with highest expression on CD8 T cells and NK cells (FIG. 27A). Further subset analysis of T cells showed highest PVRIG expression on CD8 or CD4 memory/effector T cell subsets in comparison with Treg subset (FIG. 27B, FIG. 34A). The predominantly memory T-cell expression pattern differentiates PVRIG from other receptors in the family (TIGIT, CD96) which tend to have equal or higher expression on Tregs compared to memory/effector T cells. We further compared the expression kinetics of PVRIG and TIGIT post T cell activation in 2 assay systems (CMV recall response FIG. 27C, DC-MLR FIG. 27D, FIG. 34B) and show that PVRIG has delayed kinetics of induction and more sustained expression at the late timepoint as compared to TIGIT. The preferential expression of PVRIG on memory/effector cells as compared to TIGIT suggests a unique role for PVRIG in regulating T cell responses.

[0806] The delayed and sustained induction of PVRIG expression on T cells after activation suggested that it could be expressed in the tumor microenvironment. Next, we analyzed the expression of PVRIG on leukocytes from dissociated human tumors directly ex vivo by FACS. Expression of PVRIG was detected on CD8 T cells, CD4 T cells, and NK cells from multiple tumor types (FIG. 27E-G, Supplemental FIG. 27C). PVRIG was co-expressed with PD-1 and TIGIT on CD4 and CD8 T cells (FIG. 27F) On average, higher expression was detected on CD4⁺ and CD8⁺ TILs from breast, endometrial, head and neck, lung, kidney, and ovarian tumors as compared to bladder, colorectal, and prostate. In tumor samples in which PVRIG expression was low/not present ex vivo, activation with anti-CD3 and anti-CD28 enhanced the expression of PVRIG, suggesting that TIL expression of PVRIG can be further induced upon re-activation (FIG. 34D). For colon, lung, kidney, endometrial, and ovarian tumors, we were able to obtain normal adjacent tissue from the same patient and perform a comparison of PVRIG expression on lymphocytes isolated from the tumor vs normal tissue. TILS showed a significant induction of PVRIG on CD4 and CD8 T cells as compared to cells isolated from matching normal adjacent tissues (NAT) (FIG. 34E). As with PBMCs, we further compared PVRIG, TIGIT, and PD1 expression on Tregs vs CD8 T cells from lung, endometrial, and kidney tumors. On TTLS, TIGIT expression was higher on Tregs compared to CD8 T cells whereas for PVRIG and PD1, similar or higher expression was observed on CD8 T cells compared to Tregs (FIG. 27E). Next, we examined the co-regulation of PVRIG, TIGIT, and PD-1 on T cell populations by correlation analysis of either the magnitude of expression on TTLS ex vivo or the magnitude of the fold change in expression between tumor and NAT. In both analyses, CD4 and CD8 T cells displayed a positive and significant correlation between PVRIG and PD1 or TIGIT on (FIG. 34F). Taken together, these data demonstrate that PVRIG is expressed on T cells and NK cells from multiple human cancers, placing PVRIG as a novel inhibitory receptor target that may be critical in regulating T cell function in the tumor.

### PVRL2 Expression is Enhanced in Tumors Tissue Compared to Normal Adjacent Tissue

[0807] As PD-L1 expression has been demonstrated to help predict responses to PD-1 inhibitors, we examined whether the expression of PVRL2 was concomitant with expression of its cognate receptor, PVRIG, in human cancer tissues. Using a PVRL2 antibody that we validated for use in IHC (FIG. 35A), we stained tumor microarrays (TMA) composed of lung, colon, skin, breast, ovarian/endometrial, and kidney cancer tissues. With the exception of kidney, PVRL2 expression was not present or minimally expressed in the majority of normal tissues from these organs. In tumor tissues, PVRL2 was induced in a substantial number of lung, colon, skin, breast, and ovarian/endometrial cancer samples (FIG. 28A). PVRL2 expression was detected on tumor cells and immune cells at the invasive front (FIG. 28B). To determine the specific immune cell subsets expressing PVRL2, we performed flow cytometry on freshly dissociated tumors. Consistent with the IHC expression profile, expression of PVRL2 was detected on CD45⁺ immune cells, particularly myeloid cells (e.g. CD14⁺ tumor associated macrophages (TAMs) and myeloid DCs) and on CD45⁻ non-immune cells from multiple tumor types (FIG. 28C, D). No expression of PVRL2 was detected on lymphocytes (data not shown). Comparison of PVRL2 expression on CD45⁻ cells and TAMs isolated from colon, lung, kidney, endometrial, and ovarian tumors showed a significant induction of PVRL2 on cells isolated from the tumor as compared to cells isolated from matching normal adjacent tissues (NAT) of the same donor (FIG. 36D). To assess which tumors expressed both PVRIG and PVRL2, we examined expression of PVRIG on lymphocytes compared with PVRL2 on myeloid cells and on CD45⁻ cells from multiple tumor types. Of the cancer types examined, endometrial, lung, and kidney cancers had the highest prevalence of PVRIG^{hi} lymphocytes and PVRL2^{hi} TAMs or CD45⁻ non-immune cells (FIG. 28E, FIG. 37). These data demonstrate that the PVRIG-PVRL2 pathway may be particularly important in modulating the anti-tumor response by regulating the T cell—TAM interaction and the T cell-tumor cell interaction in endometrial, lung, and kidney cancers.

### Compared to PD-L1, PVRL2 Expression is Differentially Regulated and Present in PD-L1-Tumors

[0808] As PVRIG and PD-1 can be co-expressed on tumor-infiltrating lymphocytes (TILs), we also examined the co-expression of PVRL2 and PD-L1 on the same tumor by staining serial sections of the same TMA. All PD-L1-positive tumors also expressed PVRL2, indicating some overlap in the regulation of these 2 pathways and providing a rationale to combine a PVRIG inhibitor with PD-1/PD-L1 inhibitors (FIG. 29A). In PD-L1negative tumors, PVRL2 was detected in a majority of these tumors across various cancer types (FIG. 29A). This suggested that PVRL2 expression was more prevalent than PD-L1 in some tumors and that targeting this pathway may be particularly effective in PD-L1-negative tumors. As PD-L1 has been reported to be induced in the tumor by IFN-γ as part of the adaptive resistance model (25), we further assessed the regulation of PVR, PVRL2 and PD-L1 expression by various inflammatory stimuli on bone marrow derived dendritic cells and on tumor epithelial cell lines (FIG. 29D). Treatment of immature BM-DCs with pro-inflammatory signals generally lead to an increase in PVR, PVRL2, and PD-L1 expression, demonstrating that PVR, PVRL2, and PD-L1 expression are both increased upon DC maturation. In contrast, treatment of epithelial cells with IFN-γ increased expression of PD-L1 but had no effect on the high baseline expression of PVRL2 (FIG. 29E). It has been reported that PVRL2 by genomic stress, DNA damage, and tumor suppressor genes (26) (27), further supporting a differential regulation of PVRL2 expression in comparison with PD-L1. In summary, these data indicate that PD-L1 and PVRL2 can be co-regulated on antigen presenting cells such as DCs but can be differentially regulated by IFN-γ on epithelial cells. The presence of PVRL2 in PD-L1-negative tumors suggests that targeting this pathway may be of potential benefit in patients that are non-responsive to PD-1 inhibitors.

CHA.7.518.1.H4(S241P) is a High Affinity Humanized Monoclonal Antibody to PVRIG that Disrupts the Interaction of PVRIG to PVRL2

[0809] To examine the functional consequences of antagonizing human PVRIG-PVRL2 interactions, we generated a high affinity, antagonistic anti-PVRIG antibody, CHA.7.518.1.H4(S241P), which blocks the interaction of PVRIG and PVRL2. This antibody selectively bound HEK293 cells ectopically expressing human PVRIG or cynomolgus macaque PVRIG and also bound Jurkat cells that endogenously express PVRIG with sub-nanomolar affinity (FIG. 30A). In biochemical assays, CHA.7.518.1.H4(S241P) blocked the interaction of PVRIG Fc with PVRL2⁺ HEK293 cells (FIG. 30B) and also blocked PVRL2 Fc binding to PVRIG⁺ HEK293 cells (FIG. 30C). Using this antibody, we observed a functional effect of an antagonistic anti-PVRIG in several T cell assays. Artificial antigen-presenting cells (aAPC) ectopically expressing a cell surface anti-CD3 antibody and human PVRL2 were generated and co-cultured with primary human CD4 T cells, either in the presence of anti-PVRIG (CHA.7.518.1.H4(S241P)) or isotype control. PVRIG expression was induced on proliferating CD4 T cells upon co-culture with the CHO anti-CD3 aAPC (FIG. 38A). Antagonism of PVRIG with CHA.7.518.1.H4(S241P) enhanced proliferation of CD4 T cells from multiple donors (FIG. 30D). We also tested the effect of anti-PVRIG on 2 human gp100 reactive CD8 T cell lines that were derived from melanoma tumors. These T cell lines were individually co-cultured with aAPCs expressing HLA-A2 and PVRL2 (FIG. 38B) in the presence of isotype control IgG or anti-PVRIG antibodies. As observed in both lines, anti-PVRIG increased IFN-γ and TNF-α production by˜20-50%. In a dose response assessment, CHA.7.518.1.H4(S241P) displayed single digit nano-molar EC50 values in multiple assays (FIG. 38C, D). These data collectively demonstrate that antagonizing PVRIG-PVRL2 interactions with CHA.7.518.1.H4(S241P) resulted in increased T cell activation.

CHA.7.518.1.H4(S241P) in Combination with TIGIT or PD-1 Inhibitors Resulted in Synergistic Enhancement of T Cell Function.

[0810] Combination of PVRIG and TIGIT blockade synergistically increased CD4 T cell function in a T cell-dendritic cell co-culture assay (15), suggesting a role for this pathway in regulating T cell-APC interactions. The effects of PVRIG and TIGIT blockade on CD8 T cells in a tumor cell co-culture setting has not been reported. As our tumor expression profiling demonstrated expression of PVRL2 on CD45⁻ immune cells, we further explored the effect of targeting this pathway in T cell—tumor cell co-cultures using 2 T cell assay systems. We first performed a co-culture of 2 gp100 tumor antigen specific CD8 T cell lines with a melanoma cell line, MEL624, in the presence of anti-PVRIG, anti-TIGIT, or isotype control antibodies, either individually or in combination. MEL624 cells express both PVR and PVLR2 and both TIL-209 and TIL-463 expressed PVRIG, TIGIT, and PD-1 (FIG. 30F). On TIL-209, we observed that anti-PVRIG or anti-TIGIT alone did not increase IFN-γ and that the combination of anti-PVRIG and anti-TIGIT synergistically increased IFN-γ production (FIG. 30G). On TIL-463, we observed that anti-PVRIG or anti-TIGIT modestly increased IFN-γ production, and that combination of anti-PVRIG and anti-TIGIT additively increased IFN-γ(FIG. 30G). In an additional assay system, we utilized CMVpp65-reactive CD8 T cells as a model system to study human T cell responses. HLA-A2⁺ CMVpp65 CD8 T cells were expanded in the presence of CMVpp65 (495-503) and expression of PVRIG, TIGIT, and PD-1 was observed on day 10 (FIG. 30F). PVRIG was expressed on CMVpp65 specific CD8 T cells at similar magnitude to what was observed in human cancer samples (FIG. 27). As target cells, we identified a PD-L1^{hi} (Panc05.04) and a PD-L1^{lo} (Colo205) HLA-A2⁺ cancer cell line that both expressed similar amounts of PVR and PVRL2 (FIG. 30F). We next performed a co-culture of the CMVpp65 reactive T cells with HLA-A2⁺ tumor cell lines pulsed with pp65 (495-503) peptide in the presence of blocking antibodies to PVRIG, TIGIT, and/or PD-1. We observed that anti-PVRIG Ab increased IFN-γ by ˜50% in the co-culture with Panc05.04 cells and minimally in the co-culture with Colo205 (FIG. 30H). Combination of anti-TIGIT with anti-PVRIG Ab synergistically increased IFN-γ production on both target cell lines, resulting in a greater increase in IFN-γ compared to PD-1 antibody alone (FIG. 30H). Combination of anti-PVRIG and anti-PD-1 also led to synergistic increases in IFN-γ production as compared to individual antibody (FIG. 30I). Taken together, these data suggest a potent synergy of combining PVRIG and TIGIT or PVRIG and PD1 blockade in increasing activation of human CD8 T cells upon interaction with tumor cells.

### PVRIG Deficiency Resulted in Increased T Cell Proliferation and Reduced Tumor Growth

[0811] Although the sequence for mouse PVRIG and its interaction with mouse PVRL2 has been reported, the expression profile and immune modulatory activity of mouse PVRIG is not well understood. We first analyzed mPVRIG RNA expression and transcript in NK, NKT and T cells (FIG. 31A). Activated mouse CD8 T cells had elevated PVRIG transcripts with delayed induction kinetics compared to TIGHT (FIG. 3113). We confirmed that that recombinant mPVRIG bound to mPVRL2 protein by surface plasmon resonance (SPR) and ELISA performed in several assay orientations (FIG. 39A-D). We also observed an interaction between mPVRIG and mPVR, although the affinity was approximately 10× less than the interaction with mPVRL2 (FIG. 39E). To determine whether PVR or PVRL2 is the dominant ligand for mPVRIG, we tested the binding of mouse PVRIG Fc to B16F10 cells which express PVR and PVRL2 (data not shown). PVRIG Fc showed a dose dependent binding to B16F10 cells that was completely abolished upon PVRL2 siRNA knockdown in B16F10 cells (FIG. 39F). In comparison, the binding of PVRIG Fc fusion protein was slightly, but consistently, reduced following PVR knockdown (FIG. 39E) suggesting that a very weak interaction occurs between mPVRIG and mPVR. Taken together, these results demonstrate that in mice, PVRL2 is the primary ligand for PVRIG, as is the case in human.

To delineate the role of PVRIG in immune responses, we generated PVRIG deficient (^{-/-}) mice (FIG. 40). PVRIG^{-/-} mice were born at the expected Mendelian ratios, displayed no overt phenotype up to 10 months of age, and at 8 weeks of age had similar leukocyte cellularity (peripheral and lymphoid tissue) when compared to wild type mice (FIG. 41). Wild-type (WT) CD8 T cells and NK cells express PVRIG and no expression of PVRIG was detected on PVRIG^{-/-} cells (FIG. 31C). To examine the role of PVRIG in regulating mouse T cell responses, we examined the proliferation of WT and PVRIG^{-/-} T cells in 2 assay systems. WT or PVRIG^{-/-} T cells were activated with immobilized anti-CD3 in the presence of soluble PVRL2 Fe or control Fc protein. Soluble PVRL2 Fc significantly inhibited WT CD4⁺ T cell proliferation but not PVRIG^{-/-} CD4⁻ T cell proliferation (FIG. 31D), suggesting that PVRIG^{-/-} cells lack an inhibitory signal. To evaluate the role of mouse PVRIG in CD8⁺ T cell interaction with tumor cells, PVRIG^{-/-} mice were bred to pmel TCR transgenic mice, which express a transgenic TCR specific to gp100₂₅₋₃₃ (28). Activated PVRIG^{-/-} or WT Pmel CD8+ T cells were co-cultured with B16-Db/gp100 melanoma tumor cells that endogenously express PVRL2 (data not shown) and activation and effector function evaluated. PVRIG^{-/-} pmel CD8⁺ T cells showed enhanced degranulation and production of effector cytokines (IFN-γ and TNF-α) compared to WT cells (FIG. 31E). These data indicate that mouse PVRIG inhibits activation and effector function of tumor-specific T cells upon co-culture with PVRL2⁺ tumor target cells.

[0812] We next studied the effects of PVRIG deficiency on tumor growth in the MC38 syngeneic model. PVRIG^{-/-} mice displayed significantly reduced tumor growth compared to WT mice (FIG. 32A-B). Moreover, PVRIG^{-/-} mice exhibited additional anti-tumor responses following PD-L1 blockade beginning day 14, reflected in significant (p=0.052) tumor growth inhibition compared to anti-PD-L1-treated WT mice or PVRIG^{-/-} mice treated with isotype control FIG. 32C,D). Consistent with the reduced tumor growth, anti-PD-L1-treated PVRIG^{-/-} mice displayed a significant increase in IFN-γ⁺TTNF-α⁺ effector CD8 T cells upon ex vivo stimulation, compared to anti-PD-L1-treated wild-type mice as well as isotype-treated PVRIG^{-/-} mice (FIG. 32E). Further, anti-PD-L1-treated PVRIG^{-/-} mice also had elevated numbers of effector cytokine-producing CD8⁺ tumor-infiltrating lymphocytes (TILs), when compared to anti-PD-L1-treated wild-type mice as well as isotype-treated PVRIG^{-/-} mice (FIG. 32F). Transcriptomic profiling of CD45⁺ immune cells from tumors harvested midway through the experiment (day 18; mice received 2 doses of anti-PD-L1 or isotype control) showed that the gene signatures for TIL numbers and cytotoxic TILs were significantly enhanced in anti-PD-L1-treated PVRIG deficient mice relative to their wild-type counterparts (FIG. 32G-H). Significant changes in T cell mediated genes (GRZB, IFN-γ) was observed in the PVRIG^{-/-} +anti-PD-L1 group as compared to the other groups (Supplemental FIG. 42). Taken together, these data demonstrate that PVRIG deficiency, particularly when combined with PD-L1 blockade, resulted in increased T cell activation and reduced tumor growth in vivo.

Anti-mPVRIG Antibody Inhibited Tumor Growth in Combination with PD-1 Antibody or TIGIT Deficiency

[0813] After demonstrating that genetic deficiency of PVRIG resulted in reduced tumor growth, we next aimed to demonstrate that antibody-mediated inhibition of PVRIG-PVRL2 interaction could improve anti-tumor immunity, in particular in combination with P1 or TIGIT inhibitors as our human in vitro data has demonstrated. To assess this, we generated a high affinity, antagonistic anti-mPVRIG antibody. Affinity assessments of anti-mPVRIG mAb determined by FACS showed sub-nano-molar Kd (0.33 nM on HEK293 mPVRIG, 0.39 nM on D10.G4.1 cells), similar to CHA.7.518.1.H4(S241P) (FIG. 39F-G). The specificity of this antibody was further confirmed as the majority of binding to D10.G4.1 cells was abrogated upon mPVRIG knockdown (FIG. 39H). Anti-mPVRIG was tested for disrupting mPVRIG-mPVRL2 interaction by inhibiting the binding of mPVRIG Fe to B16F10 and the binding of mPVRL2 Fe to mPVRIG-overexpressing HEK293 cells (FIG. 33A). Complete blocking of PVRIG-PVRL2 interaction by anti-mPVRIG antibody was observed in both assay formats (FIG. 33A, FIG. 39I), demonstrating an antagonistic anti-mPVRIG antibody. Next, we tested the in vivo efficacy of mPVRIG blockade in a syngeneic CT26 subcutaneous colon tumor model. PVRIG expression was elevated on NK and T cells in the tumor microenvironment, compared to corresponding splenic or draining lymph node subsets (FIG. 33B). Treating tumor bearing mice with anti-mPVRIG blocking mAb as monotherapy failed to reduce tumor growth (data not shown). However, combination of anti-PVRIG and anti-PD-L1 mAbs effectively delayed CT26 tumor growth (FIG. 33C) and increased significantly the survival of treated mice with 40% rate of complete responders (FIG. 33D). Consistent with our human T cell assay data, these data demonstrate that combination of PD-1 and PVRIG inhibitors can reduce tumor growth.

[0814] We also tested the effect of ablating both PVRIG and TIGIT signaling in regulating anti-tumor responses. For these studies, we tested the efficacy of anti-MPVRIG antibody in either WT or TIGIT mice inoculated with B16F10/Db-hmgp100 melanoma cells. Treatment of tumor bearing WT mice with anti-mPVRIG blocking mAb had minor effect compared to isotype treatment (17% TGI at day 11 and 8% TGI at endpoint, day 18). The effect of TIGIT deletion on tumor growth was minor as well, compared to WT control group (17% TGI at day 11 and 13% TGI at endpoint). However, when TIGIT deletion was combined with anti-PVRIG mAb treatment, a significant tumor growth inhibition was observed (63% at day 11 and 49% TGI at endpoint (FIG. 33E, F). In accordance to tumor growth inhibition, TIGIT^{-/-} mice treated with anti-PVRIG mAb 407 exhibited increased survival compared to WT control group, however, statistical significance was not achieved in this aggressive rapidly growing tumor model (data not shown). Taken together, these data demonstrate synergistic activity of PVRIG inhibitors with PD1 or TIGIT inhibitors and are in accordance with our human functional data providing the rationale for clinical testing of CHA.7.518.1.H4(S241P) with PD1 or TIGIT inhibitors.

### DISCUSSION

[0815] Although antibodies targeting immune T cell checkpoints such as CTLA4 and PD-1 have increased cancer patient survival, the majority of cancer patients still do not display clinical benefit. One possible reason for this is the presence of additional T cell regulators that inhibit T cell anti-tumor immunity. Here, we elucidated the role of PVRIG in regulating effector T cell function and demonstrate that PVRIG antagonism increases T cell anti-tumor responses and reduces tumor growth.

[0816] PVRIG is a novel member of the nectin and nectin like family, placing it among several known immunoregulatory receptors in the family. Understanding the interplay of the receptors within this family is crucial to understanding the relevance and mechanism of action of PVRIG. Of these receptors, DNAM, TIGIT, and CD96 are most closely related to PVRIG in terms of sharing the same ligands, PVR and PVRL2. DNAM binds to both PVR and PVRL2 and delivers a costimulatory signal to lymphocytes. TIGIT is reported to bind to PVR and weakly to PVRL2. We were unable to detect an interaction between TIGIT and PVRL2 using ELISA or SPR (data not shown), suggesting that PVR is the dominant ligand for TIGIT. Using similar methods, we and a recent report detected a high affinity interaction between PVRL2 and PVRIG, suggesting that PVRIG is the dominant inhibitory receptor to PVRL2. These data suggest that TIGIT and PVRIG comprise dual signaling nodes in this axis and that blocking both is needed for maximal increase of T cell activation within this family. In addition to interacting with different ligands, we observed that PVRIG has the highest expression on effector or memory T cells, similar to PD-1 whereas TIGIT has the highest expression on regulatory T cells. Furthermore, we observed that PVRIG displayed late induction after T cell activation as compared to TIGIT. These data suggest that PVRIG has a unique role within this family, interacting with high affinity to PVRL2 and having a differentiated expression on memory cells and a late induction profile to TIGIT.

[0817] We also report here on the novel role of PVRIG in regulating anti-tumor T cell responses using PVRIG deficient mice and antagonistic anti-PVRIG antibodies. We demonstrate that mouse PVRIG was expressed on T cells and NK cells, induced upon lymphocyte activation, and is highest in the TME as compared to the periphery. Furthermore, we show that PVRIG deficiency led to increased T cell function in-vitro and reduced tumor growth in-vivo. An antagonistic antibody to PVRIG reduced tumor growth when combined with anti-PD-L1 or genetic deficiency of TIGIT, demonstrating a necessary role of PVRIG in regulating T cell responses. These novel data provide in vivo proof of concept using preclinical tumor models that targeting PVRIG in combination with PD1 or TIGIT antagonism is a potential novel therapy for the treatment of cancers.

[0818] We report here on a high affinity anti-human PVRIG antibody that disrupts the interaction of PVRIG and PVRL2 which we are pursuing for testing in clinical trials. To determine potential cancer indications that could inform on patient selection in clinical trials, we examined the expression profile of this axis in human cancers by FACS and IHC. For PVRIG, we observed that the mean expression of PVRIG on CD4 and CD8 T cells by FACS highest in endometrial, lung, kidney, and ovarian cancers, although this difference did not achieve statistical difference with other cancer types as determined by ANOVA with a Tukey's multiple comparison test with the current number of samples. As PVRIG is induced upon T cell activation and given that the majority of tumor infiltrating T cells are antigen experienced, it is perhaps not surprising that the median PVRIG expression was similar across tumor samples and cancer types. We observed that PVRIG expression was correlated with PD-1 and TIGIT expression, suggesting that the interplay of these 3 inhibitory receptors will be important in regulating the anti-tumor response. In this report, we observed a synergistic increase in T cell function when PVRIG antibodies were combined with TIGIT antibodies in a CD8 T cell tumor cell co-culture, better than PD-1 in combination with PVRIG or TIGIT inhibitors. These data, along with a previous study demonstrating a role for PVRIG and TIGIT in regulating DC-T cell interactions, show that this pathway could be involved in regulating T cell-APC and T cell-tumor cell interactions, and provide multiple mechanisms by which targeting PVRIG could increase the anti-tumor immune response.

[0819] As expression of PD-L1 has been correlated with clinical response to PD-1 inhibitors, we also analyzed PVRL2 expression in tumors by FACS and IHC to assess whether certain cancer types have higher expression. Assessing dissociated tumor cells, we observed that mean PVRL2 expression on macrophages from endometrial, head & neck, kidney, lung, and ovarian samples were higher when compared to other tumor types. Mean PVRL2 expression on CD45⁻ non immune cells was higher on breast, colorectal, endometrial, lung, ovarian, and prostate cancers compared to other cancers. Based on the PVRIG and PVRL2 expression, we determined that endometrial, head & neck, lung, kidney, and ovarian cancers have a greater incidence of tumors with high PVRIG and PVRL2 expression and that these are potential cancers that could response to inhibitors of this pathway.

[0820] We did observe that PVRL2 expression can be modulated on antigen producing cells in vitro by inflammatory mediators whereas PVRL2 expression on cancer cells was not altered. These data suggest that PVRL2 expression on antigen presenting cells can be regulated by inflammation and could be an indicator of an inflamed tumor. Indeed, we did observe that all PD-L1+ tumors also express PVRL2, both on the tumor cells and in the immune compartment. Expression of PVRL2 on myeloid cells could help predict responses to PVRIG inhibitors in a combination setting with PD-1 or TIGIT to further enhance the anti-tumor effect. Interestingly, a portion of PD-L1 negative tumors also expressed PVRL2, primarily on the tumor cells and not on the immune cells. PVR and PVRL2 expression on epithelial cells is reported to be induced in tumorigenesis by xyz and also in response to stress and DNA damage. These data are consistent with our in vitro finding that the regulation of PVRL2 expression on tumor cells is not dependent on IFN-γ. As PD-L1 is induced in an adaptive resistance setting in response to IFN-γ and is associated with an inflammatory response, the expression of PVRL2 in the absence of PD-L1 suggests that PVRL2 expression is more prevalent than PD-L1 and that PVRL2 is expressed in non-inflamed tumors. Based on the above, it is possible that the presence of PVR and PVRL2 contribute to suppressing immune responses independently of PD-L1 and that inhibitors of PVRIG and TIGIT could be of particular importance in patients that are PD-L1 negative or non-responders/progressors to PD-1 inhibitors.

[0821] In summary, this report provides several novel insights into PVRIG biology, including characterizing the expression of this axis in human cancers, demonstrating a prominent role for PVRIG/TIGIT in regulating the CD8-tumor cell interaction, and showing that PVRIG antagonism in combination with PD-1 inhibition or TIGIT deficiency lead to a synergistic reduction in tumor growth. These data extend our current understanding of PVRIG biology and provide rationale for clinical testing of CHA.7.518.1.H4(S241P), a high affinity anti-PVRIG antibody, in patients with cancer.

### REFERENCES

[0822] 1. Hanahan D, Weinberg R A. The hallmarks of cancer. Cell 2000; 100(1):57-70.
[0823] 2. Hanahan D, Weinberg R A. Hallmarks of cancer: the next generation. Cell 2011; 144(5):646-74 doi 10.1016/j.cell.2011.02.013.
[0824] 3. Galon J, Mlecnik B, Bindea G, Angell H K, Berger A, Lagorce C, et al. Towards the introduction of the ‘Immunoscore’ in the classification of malignant tumours. J Pathol 2014; 232(2):199-209 doi 10.1002/path.4287.
[0825] 4. Zitvogel L, Galluzzi L, Smyth M J, Kroemer G. Mechanism of action of conventional and targeted anticancer therapies: reinstating immunosurveillance. Immunity 2013; 39(1):74-88 doi 10.1016/j.immuni.2013.06.014.
[0826] 5. Danilova L, Wang H, Sunshine J, Kaunitz G J, Cottrell T R, Xu H, et al. Association of PD-1/PD-L axis expression with cytolytic activity, mutational load, and prognosis in melanoma and other solid tumors. Proc Natl Acad Sci USA 2016; 113(48):E7769-E77 doi 10.1073/pnas.1607836113.
[0827] 6. Topalian S L, Taube J M, Anders R A, Pardoll D M. Mechanism-driven biomarkers to guide immune checkpoint blockade in cancer therapy. Nat Rev Cancer 2016; 16(5):275-87 doi 10.1038/nrc.2016.36.
[0828] 7. Zarour H M. Reversing T-cell Dysfunction and Exhaustion in Cancer. Clin Cancer Res 2016; 22(8):1856-64 doi 10.1158/1078-0432.CCR-15-1849.
[0829] 8. Pardoll D M. The blockade of immune checkpoints in cancer immunotherapy. Nat Rev Cancer 2012; 12(4):252-64 doi 10.1038/nrc3239.
[0830] 9. Sharma P, Allison J P. Immune checkpoint targeting in cancer therapy: toward combination strategies with curative potential. Cell 2015; 161(2):205-14 doi 10.1016/j.cell.2015.03.030.
[0831] 10. Cha E, Klinger M, Hou Y, Cummings C, Ribas A, Faham M, et al. Improved survival with T cell clonotype stability after anti-CTLA-4 treatment in cancer patients. Sci Transl Med 2014; 6(238):238ra70 doi 10.1126/scitranslmed.3008211.
[0832] 11. Robert L, Tsoi J, Wang X, Emerson R, Homet B, Chodon T, et al. CTLA4 blockade broadens the peripheral T-cell receptor repertoire. Clin Cancer Res 2014; 20(9):2424-32 doi 10.1158/1078-0432.CCR-13-2648.
[0833] 12. Tumeh P C, Harview C L, Yearley J H, Shintaku I P, Taylor E J, Robert L, et al. PD-1 blockade induces responses by inhibiting adaptive immune resistance. Nature 2014; 515(7528):568-71 doi 10.1038/naturel3954.
[0834] 13. Chan C J, Andrews D M, Smyth M J. Receptors that interact with nectin and nectin-like proteins in the immunosurveillance and immunotherapy of cancer. Curr Opin Immunol 2012; 24(2):246-51 doi 10.1016/j.coi.2012.01.009.
[0835] 14. Martinet L, Smyth M J. Balancing natural killer cell activation through paired receptors. Nat Rev Immunol 2015; 15(4):243-54 doi 10.1038/nri3799.
[0836] 15. Zhu Y, Paniccia A, Schulick A C, Chen W, Koenig M R, Byers J T, et al. Identification of CD112R as a novel checkpoint for human T cells. J Exp Med 2016; 213(2):167-76 doi 10.1084/jem.20150785.
[0837] 16. Bottino C, Castriconi R, Pende D, Rivera P, Nanni M, Carnemolla B, et al. Identification of PVR (CD155) and Nectin-2 (CD112) as cell surface ligands for the human DNAM-1 (CD226) activating molecule. J Exp Med 2003; 198(4):557-67 doi 10.1084/jem.20030788.
[0838] 17. Yu X, Harden K, Gonzalez L C, Francesco M, Chiang E, Irving B, et al. The surface protein TIGIT suppresses T cell activation by promoting the generation of mature immunoregulatory dendritic cells. Nat Immunol 2009; 10(1):48-57 doi 10.1038/ni.1674.
[0839] 18. Stanietsky N, Simic H, Arapovic J, Toporik A, Levy O, Novik A, et al. The interaction of TIGIT with PVR and PVRL2 inhibits human NK cell cytotoxicity. Proc Natl Acad Sci USA 2009; 106(42):17858-63 doi 10.1073/pnas.0903474106.
[0840] 19. Johnston R J, Comps-Agrar L, Hackney J, Yu X, Huseni M, Yang Y, et al. The immunoreceptor TIGIT regulates antitumor and antiviral CD8(+) T cell effector function. Cancer Cell 2014; 26(6):923-37 doi 10.1016/j.ccell.2014.10.018.
[0841] 20. Zhang B, Zhao W, Li H, Chen Y, Tian H, Li L, et al. Immunoreceptor TIGIT inhibits the cytotoxicity of human cytokine-induced killer cells by interacting with CD155. Cancer Immunol Immunother 2016; 65(3):305-14 doi 10.1007/s00262-016-1799-4.
[0842] 21. Chan C J, Martinet L, Gilfillan S, Souza-Fonseca-Guimaraes F, Chow M T, Town L, et al. The receptors CD96 and CD226 oppose each other in the regulation of natural killer cell functions. Nat Immunol 2014; 15(5):431-8 doi 10.1038/ni.2850.
[0843] 22. Fuchs A, Cella M, Giurisato E, Shaw A S, Colonna M. Cutting edge: CD96 (tactile) promotes NK cell-target cell adhesion by interacting with the poliovirus receptor (CD155). J Immunol 2004; 172(7):3994-8.
[0844] 23. Machlenkin A, Uzana R, Frankenburg S, Eisenberg G, Eisenbach L, Pitcovski J, et al. Capture of tumor cell membranes by trogocytosis facilitates detection and isolation of tumor-specific functional CTLs. Cancer Res 2008; 68(6):2006-13 doi 10.1158/0008-5472.CAN-07-3119.
[0845] 24. Ohtani H, Nakajima T, Akari H, Ishida T, Kimura A. Molecular evolution of immunoglobulin superfamily genes in primates. Immunogenetics 2011; 63(7):417-28 doi 10.1007/s00251-011-0519-7.
[0846] 25. Taube J M, Anders R A, Young G D, Xu H, Sharma R, McMiller T L, et al. Colocalization of inflammatory response with B7-h1 expression in human melanocytic lesions supports an adaptive resistance mechanism of immune escape. Sci Transl Med 2012; 4(127):127ra37 doi 10.1126/scitranslmed.3003689.
[0847] 26. Cerboni C, Fionda C, Soriani A, Zingoni A, Doria M, Cippitelli M, et al. The DNA Damage Response: A Common Pathway in the Regulation of NKG2D and DNAM-1 Ligand Expression in Normal, Infected, and Cancer Cells. Front Immunol 2014; 4:508 doi 10.3389/fimmu.2013.00508.
[0848] 27. de Andrade L F, Smyth M J, Martinet L. DNAM-1 control of natural killer cells functions through nectin and nectin-like proteins. Immunol Cell Biol 2014; 92(3):237-44 doi 10.1038/icb.2013.95.
[0849] 28. Overwijk W W, Tsung A, Irvine K R, Parkhurst M R, Goletz T J, Tsung K, et al. gp100/pmel 17 is a murine tumor rejection antigen: induction of “self”-reactive, tumoricidal T cells using high-affinity, altered peptide ligand. J Exp Med 1998; 188(2):277-86.

### Example 6: Tumor Cell Killing Assay

[0850] The effect of an anti-human TIGIT antibody and CHA.7.518.1.H4(S241P), either alone or in combination, on tumor cell killing was assessed by an in vitro co-culture assay with human CMV-specific CD8⁺ T cells. The HLA-A2⁺ target cell lines used in the assay were the melanoma cell line, Me1624, which stably expresses human PVR and PVRL2, and the pancreatic adenocarcinoma cell line, Panc05.04, which expresses endogenous levels of human PVR and PVRL2. Both tumor cell lines were stably transduced with a luciferase reporter gene through lentiviral transduction (System Biosciences). Me1624 and Panc05.04 cells were pulsed with the CMV pp65 peptide at 0.0033 μg/ml or 0.01 μg/ml at 37° C. for 1 hour, respectively. Cells were then washed and plated at 20,000 cells/well. A benchmark anti-human TIGIT antibody and CHA.7.518.1.H4(S241P) were added to the culture in combination, or with a control hIgG4 isotype antibody at 10 μg/ml. Human CMV-specific CD8⁺ T cells from three different donors, specified as Donor 4, Donor 72, and Donor 234 were added at 100,000 cells/well. Co-cultures were incubated at 37° C. for 16 hours. After the incubation, plates were removed from the incubator and allowed to equilibrate to room temperature for 30 minutes. Bio-Glo luciferase substrate (Promega) was added to each well and the mixture equilibrated for 10 minutes at room temperature protected from light. Luminesce or relative light units (RLU) was quantified on an EnVision multi-label reader (Perkin Elmer) with an ultra-sensitive luminescence detector. Percent specific killing was calculated by [(RLU for treatment antibody−RLU for medium alone)/RLU for medium alone]×100.

### Results

[0851] FIGS. 43A and B show the effect of the anti-TIGIT antibody and CHA.7.518.1.H4(S241P) treatment on killing of the Me1624 and Panc05.04 cells, respectively. When added to the co-culture alone, both the anti-TIGIT antibody and CHA.7.518.1.H4(S241P) induced significant T cell killing of the tumor cell lines compared to the isotype control antibody. For the anti-TIGIT antibody the percent specific killing ranged from 19-41% for the Me1624 cells, and 3-44% for the Panc05.04 cells across the 3 different CMV-reactive donors tested. For CHA.7.518.1.H4(S241P), the percent specific killing ranged from 16-20% for the Me1624 cells, and 0.21-29% for the Panc05.04 cells. In some cases, an additive effect on tumor cell killing was observed in the combined treatment of the anti-TIGIT antibody and CHA.7.518.1.H4(S241P).

[0852] To determine whether the effect of an anti-TIGIT antibody and CHA.7.518.1.H4(S241P) on tumor cell killing was dose-dependent, the assay was carried out with a 10 point, 2-fold dilution series for each antibody starting at 0.5 μg/ml for the anti-TIGIT antibodies, and 10 μg/ml for CHA.7.518.1.H4(S241P) (FIG. 44). Me1624 killing decreased in a dose-dependent manner when either anti-TIGIT antibody, BM26 or CPA.9.086, were combined with CHA.7.518.1.H4(S241P). More potent killing was observed for the CPA.9.086 and CHA.7.518.1.H4(S241P) combination with an EC₅₀ of 0.40±0.49 nM, compared to the BM26 and CHA.7.518.1.H4(S241P) combination with an EC₅₀ of 2.6±1.7 nM.

### Example 7: Biophysical Measurement of KD

[0853] KinExA equilibrium experiments were performed using a KinExA 3200 instrument (Sapidyne Instruments, Boise, ID, USA) at 22° C. Recombinant His-tagged human TIGIT was obtained from Sino Biologicals (Beijing, China) and reconstituted into 1×PBS. All antigen and antibody samples for KinExA analyses were prepared in degassed PBST buffer (PBS with 0.05% tween 20) with 100 μg/mL filtered BSA and 0.02% sodium azide. The secondary detection antibody used was Alexa Flour 647-labeled goat anti-human IgG (H+L) (Jackson ImmunoResearch Laboratories) diluted 400- to 700-fold in the PBST buffer (with BSA and azide) described above from a 0.5 mg/mL stock in 1×PBS, pH 7.4. For each KinExA experiment, ˜20 μg of human TIGIT was diluted into 1 mL of 50 mM sodium carbonate, pH 9.2 which was added directly to 50 mg of azlactone beads (Ultralink Support, Thermo Scientific, Rockford, IL, USA) and rocked overnight at 4° C. After rocking, the beads were rinsed once with 1 M Tris buffer, pH 8.5, containing 10 mg/mL BSA and rocked for one hour at room temperature in the same buffer. Coupled beads were added to the bead reservoir in the KinExA instrument and diluted to ˜30 mL with 1× HBS-N (0.01 M Hepes, 0.15M NaCl, GE Healthcare) containing 0.02% sodium azide which was also the running buffer for the KinExA instrument. All antigen-coupled beads were used immediately after preparation.

[0854] For two replicate measurements of K_{D} for CPA.9.086 (Table 1), 14 concentrations of TIGIT ranging from 957 aM-212 pM were equilibrated at room temperature for ˜72 hours with 2.5 pM CPA.9.086 binding sites and 1.8 pM CPA.9.086 binding sites. For CPA.9.083, 14 concentrations of TIGIT ranging from 478 aM-196 pM were equilibrated for ˜72 hours with 1.8 pM CPA.9.083 binding sites. For duplicate measurements of the benchmark antibody, BM26 hIgG4, 14 concentrations of TIGIT ranging from 9.6 fM-3.53 nM were equilibrated for ˜72 hours with 20 pM BM26 binding sites and 8.0 pM BM26 binding sites. For CHA.9.547.13, 14 concentrations of TIGIT ranging from 10.5 fM-2.2 nM were equilibrated for ˜72 hours with 8 pM mAb CHA.9.547.13 binding sites. The volume flowed through the bead pack for each equilibrated sample for all experiments ranged from 4 mL to 11 mL at a flow rate of 0.25 mL/min. Data were fit with a 1:1 “standard equilibrium” binding model using KinExA Pro software (Version 4.2.10; Sapidyne Instruments) to estimate K_{D} and generate the 95% confidence interval (CI) of the curve fit.

### Results

[0855] Both CPA.9.083 and CPA.9.086 bound to human TIGIT with femtomolar binding affinity, while CHA.9.547.13 and BM26 bound with picmolar affinity. Thus, CPA.9.083 and CPA.9.086 bound to human TIGIT with the highest affinity of the four different antibodies tested.

TABLE 1
K_{D} measurements of anti-human TIGIT
hIgG4 antibodies determined by KinExA

| | | |
|---|---|---|
| Antibody | K_{D} ± 95% CI (n = 1) | K_{D} ± 95% CI (n = 2) |

| | | | |
|---|---|---|---|
| CHA.9.547.13 | 18.8 ± 5.8 | pM | Not determined |
| CPA.9.083 | 694 ± 277 | fM | Not determined |
| CPA.9.086 | 553 ± 230 | fM | 665 ± 378 fM |
| BM26 | 8.2 ± 2.8 | pM | 11.2 ± 3.6 pM |

### Example 8: Development and Functional Characterization of CPA.9.086, a Novel Therapeutic Antibody Targeting the Immune Checkpoint TIGIT

[0856] Background: TIGIT is a coinhibitory receptor that is highly expressed on lymphocytes, including effector and regulatory CD4+ T cells (Tregs), effector CD8+ T cells, and NK cells, that infiltrate different types of tumors. Engagement of TIGIT with its reported ligands, poliovirus receptor (PVR) and PVR-like proteins (PVRL2 and PVRL3) directly suppresses lymphocyte activation. PVR is also broadly expressed in tumors, suggesting that the TIGIT-PVR signaling axis may be a dominant immune escape mechanism for cancer. We report here the biophysical and functional characterization of CPA.9.086, a therapeutic antibody targeting TIGIT. We also demonstrate that co-blockade of TIGIT and a new checkpoint inhibitor, PVRIG, augments T cell responses.

[0857] Materials and Methods: Human phage display and mouse hybridoma antibody discovery campaigns were conducted to generate therapeutic anti-TIGIT antibodies. The resulting antibodies were evaluated for their ability to bind to recombinant and cell surface-expressed human TIGIT with high affinity. Cross-reactivity of the antibodies to cynomolgus macaque and mouse TIGIT was also examined. A subset of antibodies that bound with high affinity to human TIGIT, and cross-reactive to cynomolgus TIGIT were further characterized for their ability to block the interaction between TIGIT and PVR. Blocking antibodies were screened for their ability to enhance antigen-specific T cell activation in vitro either alone, or in combination with an anti-PVRIG antibody, CHA.7.518.1.H4(S241P).

[0858] Results: We identified a lead antibody, CPA.9.086, that binds to human TIGIT with high femtomolar affinity. This antibody bound to TIGIT endogenously expressed on human CD8+ T cells with higher affinity than tested benchmark antibodies, and was also cross-reactive to both cynomolgus and mouse TIGIT. When tested for in vitro activity, CPA.9.086 augmented cytokine secretion and tumor cell killing by CMV-specific CD8+ T cells with superior or equivalent potency to the tested benchmark antibodies. Combination of CPA.9.086 with an anti-PD1 antibody or CHA.7.518.1.H4(S241P) resulted in enhanced CMV-specific CD8+ T cell activity. Furthermore, we demonstrated that TIGIT is predominantly expressed on Tregs and effector CD8+ T cells from solid tumors compared to peripheral blood, suggesting that these populations will likely be preferentially targeted by CPA.9.086.

[0859] Conclusion: We describe the development of a very high affinity antagonistic TIGIT antibody, CPA.9.086, that is currently in preclinical development. We postulate that the femtomolar affinity of CPA.9.086 could result in lower and less frequent dosing in patients. CPA.9.086 can enhance human T cell activation either alone or in combination with other checkpoint antibodies. Thus, our data demonstrates the utility of targeting TIGIT, PD1, and PVRIG for the treatment of cancer.

### Example 9: Analysis of the TIGIT/PVRIG Axis in Human Cancers to Support Indication Selection and Biomarkers for Co-Treatment

[0860] Background: PVRIG and TIGIT were identified by Compugen's Predictive Discovery Platform as immune inhibitory receptors and have been reported to inhibit anti-tumor activity. We are pursuing clinical development of antagonistic antibodies to PVRIG (e.g. CHA7.518.1.H4(S241P)) and to TIGIT (e.g. CPA.9.083.H4(S241P)). Here, we analyzed primary human cancer tissues and immune cells to characterize expression in the TIGIT/PVRIG axis to support indication selection and combination strategies for these antibodies.

[0861] Methods: CHA7.518.1.H4(S241P) and CPA.9.083.H4(S241P) were identified based on ability to block the interaction of PVRIG and TIGIT with their cognate ligands (PVRL2 and PVR respectively) and were screened for their ability to enhance antigen-specific CD8 T cell activation in a co-culture with tumor cell lines. Immunohistochemistry and Flow cytometry were performed to assess receptor/ligand expression in dissociated bladder, breast, colorectal, head and neck, lung, kidney, ovarian, prostate, and stomach tumors.

[0862] Results: Among the cancers examined, PVRIG and PVRL2 expression was highest in endometrial, lung, kidney, ovarian, and head and neck cancers compared to normal adjacent tissue. From dissociated tumors, PVRIG expression was detected on T and NK TILs whereas PVRL2 expression was detected on CD45⁻ cells and myeloid cells. A co-expression analysis of PVRIG, TIGIT, and PD1 demonstrated that PVRIG was co-expressed with both TIGIT and PD1 and that PVRIG⁺TIGIT⁺PD1⁺ cells comprised a major proportion of CD8 TILs. In comparison to PD-L1, PVRL2 expression was more prevalent across several cancer types and expression of PVRL2 was detected in PD-L1 negative samples. In vitro, combination of CHA7.518.1.H4(S241P) with PD1 inhibitors or CPA.9.083.H4(S241P) enhanced CD8 cytokine production and cytotoxic activity, with the triple combination of CHA7.518.1.H4(S241P), CPA.9.083.H4(S241P), and PD-1 antibody yielding the greatest increase in functional activity. Several immune receptors were induced in response of PVRIG blockade by CHA7.518.1.H4(S241P) on CD8 T cells. Taken together, these data support indication selection and combination strategies for CHA7.518.1.H4(S241P) and CPA.9.083.H4(S241P) and potential biomarkers that could be indicators of response.

[0863] Conclusions: In summary, we demonstrate that PVRIG and PVRL2 are induced in the tumor microenvironment of human cancers, and the potential of CHA7.518.1.H4(S241P) as a cancer therapeutic, either as a monotherapy or as a dual- or triple-combination therapy with antibodies targeting TIGIT, and PD-1. These data highlight the potential of this combination approach to expand the immune checkpoint inhibitor responsive cancer patient population, including those who are non-responsive to PD-1 inhibitors.

### Example 10: PVRIG Expression is Associated with T Cell Exhaustion and Synergizes with TIGIT to Inhibit Anti-Tumor Responses

### Abstract

[0864] By employing a unique computational discovery platform, we identified a novel checkpoint receptor family comprised of 2 inhibitory receptors in the nectin family, TIGIT and PVRIG. PVRIG and TIGIT are both expressed upon T cell activation, but display a difference in relative expression among T cell subsets and expression kinetics. PVRIG binds to PVRL2 whereas TIGIT binds to several ligands, among which we observed that PVR is the dominant functional ligand for TIGIT. The distinct expression profile of PVRIG and a unique high affinity PVRIG-PVRL2 interaction suggest that PVRIG has a unique role in regulating immunity. Using novel PVRIG−/− mice, we observed that genetic deficiency of PVRIG resulted in increased T cell responses and reduced tumor growth in preclinical models, demonstrating the potential of targeting this pathway in cancer. To further define a clinical niche for a PVRIG antagonist, we interrogated the expression of TIGIT/PVRIG and PD-1 axis in human tumor samples. Among the human cancers examined, PVRIG and TIGIT expression on tumor derived T cells were highest in endometrial, lung, kidney, and ovarian cancers. A co-expression analysis of PVRIG, TIGIT, and PD1 demonstrated that PVRIG was correlated and co-expressed with both TIGIT and PD1 and that PVRIG⁺TIGIT⁺PD1⁺ cells comprised a major percentage of CD8 tumor infiltrating lymphocytes (TILs). Interestingly, PVRIG and not TIGIT expression on CD8⁺ TILs were associated with an exhausted Eomes^{hi} T-bet^{lo} phenotype. PVR, PVRL2, and PD-L1 also displayed tissue specific differences in relative expression level, with endometrial and ovarian tumors having a higher ratio of PVRL2 expression relative to PVR or PD-L1. Culture of primary human TILs with anti-PVRIG (CHA7.518.1.H4(S241P)) and anti-TIGIT (CPA.9.083.H4(S241P)) antagonistic antibodies enhanced T cell function to a similar or greater magnitude compared to PD-1 blockade. See, FIGS. 54 through 60.

### CHA7.518.1.H4(S241P) & CPA.9.083.H4(S241P) Target PVRIG and Tigit in the Nectin & Nectin-Like Family: Conclusions

[0865] PVRIG and TIGIT are non-redundant checkpoint receptors and promising targets for the treatment of cancer

[0866] In tumors with higher PVRL2 than PVR, the PVRIG/PVRL2 interaction could be more dominant and require direct targeting of PVRIG

### Example 11: New Preclinical Data Demonstrating the Distinctive Features of the PVRIG Pathway in Immuno-Oncology and the Potential of CHA7.518.1.H4(S241P) in Treating Multiple Solid Tumors

### Data Further Strengthens Rationale for Clinical Development Plan and Biomarker Strategy for

### CHA7.518.1.H4(S241P) CHA7.518.1.H4(S241P) Shown to be Safe at High Doses in GLP Toxicity Study

[0867] Provides new preclinical data demonstrating the distinctive features of the PVRIG pathway in Immuno-Oncology and the potential of CHA7.518.1.H4(S241P), a first-in-class therapeutic antibody candidate targeting PVRIG in treating multiple solid tumors. The data, presented at the Keystone Symposia Conference, A3: T Cell Dysfunction, Cancer and Infection, being held Jan. 16-20, 2018 (an provided in Example 9 and related figures), demonstrate the possible dominance of the PVRIG/TIGIT axis in immuno-oncology and support the Company's clinical development program and biomarker strategy for CHA7.518.1.H4(S241P) as a monotherapy and in combination with CPA.9.083.H4(S241P).

[0868] The poster titled “PVRIG Expression is Associated with T Cell Exhaustion and Synergizes with TIGIT to Inhibit Anti-Tumor Responses” (Poster no. 2028) includes data showing that expression of PVRL2, the ligand for PVRIG, is more dominant in several tumor types including lung, breast, endometrial, and ovarian, than the expression of PVR, the ligand for TIGIT. These results suggest that PVRIG may be the dominant checkpoint in patient populations with tumor expressing elevated PVRL2, many of which are not responsive to PD-1 inhibitors. Therefore, these patients may have an increased likelihood of responding to CHA7.518.1.H4(S241P) as a monotherapy treatment.

[0869] In addition, expression studies show that PVRIG and TIGIT and their respective ligands are commonly expressed in the tumor types listed above as well as kidney and head & neck cancers, indicating that in patient populations where the two pathways are operative the blockade of both TIGIT and PVRIG may be needed in order to sufficiently stimulate the anti-tumor immune response. Furthermore, data also indicates that exhausted TILs found in multiple tumor types are largely co-expressing the triple three checkpoints —, TIGIT, PD-1 and PVRIG, further supporting the relevance of a triple combination in such patient populations.

[0870] Our growing understanding of the PVRIG-TIGIT axis and the interplay between the various axis components also shed light on the evolution of the PVRIG/PVRL2 pathway in the transition from mouse to humans, resulting in a less active pathway in mice. Our data clearly demonstrates that the mouse biology in connection of this pathway is underestimating the human impact this pathway may have on anti-tumor immunity, suggesting that CHA7.518.1.H4(S241P) may have an even greater therapeutic impact than the one seen in preclinical studies.

[0871] “The potential dominance of the PVRIG pathway and its interactions with the TIGIT and PD-1 pathways demonstrated in our preclinical studies coupled with the expression profiles provide the biological rationale to support our clinical approach to test CHA7.518.1.H4(S241P) as a monotherapy and in dual and triple combination as we are preparing to initiate our clinical Phase 1b trial. While keeping our all comers trial design, our biomarker strategy will be driven by these expression profiles, in order to enrich for patients most likely to respond to CHA7.518.1.H4(S241P),” stated Anat Cohen-Dayag, PhD, President and CEO of Compugen. “We are also encouraged by results of the GLP toxicity study for CHA7.518.1.H4(S241P), showing it to be safe at high doses. Our data lead us to believe that the PVRIG pathway and CHA7.518.1.H4(S241P), our first-in-class therapeutic antibody, may hold significant clinical value as the basis of new cancer immunotherapies to meet the needs of patient populations non-responsive or refractory to current immune checkpoint inhibitor therapy.”

### About CHA7.518.1.H4(S241P) and CPA.9.083.H4(S241P)

[0872] CHA7.518.1.H4(S241P) is a humanized hybridoma antibody that binds with high affinity to PVRIG, a novel B7/CD28-like immune checkpoint target candidate discovered by Compugen, indicating blockage of this target's interaction with PVRL2. Blockade of PVRIG by CHA7.518.1.H4(S241P) has demonstrated potent, reproducible enhancement of T cell activation, consistent with the desired mechanism of action of activating T cells in the tumor microenvironment to generate anti-tumor immune responses. In addition, CHA7.518.1.H4(S241P) combined with antagonist anti-PD-1 antibodies has demonstrated synergistic effect on human T cell stimulation, indicating the potential of these combinations to further enhance immune response against tumors.

[0873] CPA.9.083.H4(S241P), Compugen's antibody targeting TIGIT, was developed for combination use with CHA7.518.1.H4(S241P). Preclinical data strongly support the dual blockade of the two negative costimulatory arms of the axis—TIGIT and PVRIG—that results in a more robust T cell response to antigen stimulation, and therefore may result in an enhanced anti-tumor immune response.

### Example 12: In Vivo Efficacy and Survival with Triple Combo Treatment

### Rationale and Objectives

[0874] This example provides regarding whether the combination of mouse TIGIT, PVRIG and PD-L1 blockade can significantly enhance tumor growth inhibition (TGI) and survival in a syngeneic mouse tumor model.

### Protocols

### Animals

[0875] Female mice of 5 week-age were purchased from Charles River Laboratories. The mice were housed at the Compugen USA animal facility with food and water provided, ad libitum, and acclimated for a minimum of 6 days prior to initiation of the study. All studies were approved by the Institutional Animal Care and Use Committee at the Compugen USA (South San Francisco, CA).

### Syngeneic Mouse Tumor Model

[0876] 5×10⁵ CT26 colon carcinoma (ATCC) cells were inoculated subcutaneously (s.c.) into the right flank of female Balb/c mice, and grown for up to 8 days. Mice with tumors measuring 30-60 mm³ were randomized (day of randomization designated day 0) into 3 groups of 10 mice per group. Animals received a 200 μL intraperitoneal (i.p.) injection of either a mouse IgG1 (mIgG1) isotype control antibody (referred to as Synagis), a dual combination of an anti-TIGIT mIgG1 and anti-PVRIG mIgG1 antibodies, or a triple combination of anti-TIGIT mIgG1, anti-PVRIG mIgG1, and anti-PD-L1 mIgG1 antibodies. The anti-TIGIT mIgG1 antibody is a chimeric version of CPA.9.086 that contains the human variable heavy and light chains of CPA.9.086 and the constant region of mIgG1. The antibodies were administered at fixed-doses of 10 mg/kg anti-TIGIT, 10 mg/kg anti-PVRIG, and a suboptimal dose of anti-PD-L1 at 3 mg/kg starting on day 8 three times per week for 2 weeks. Tumor growth is determined by caliper measurement of length (L) and width (W); wherein the tumor size is calculated with the formula (L×W²)/2. Tumor size were not allowed to exceed 2000 mm³, which was designated as the study endpoint, and mice were subsequently euthanized.

### Statistical Analysis

[0877] Two-way ANOVA with repeated measures, followed by two-way ANOVA with repeated measures for selected pairs of groups was performed using prism software. Analyses of tumor growth measurements were performed by comparing tumor volumes measured on the last day on which all study animals were alive. Statistical differences in percentage of mice tumor free were determined by a Log Rank Mantel-Cox test.

### Results and Summary

[0878] In this study, the effect of blocking three different immune checkpoint pathways, TIGIT, PVRIG and PD-L1, on TGI and survival in mice was examined. Using the mouse colon carcinoma CT26 model, the combination of the anti-TIGIT mIgG1 with the anti-PVRIG mIgG1 resulted in small but significant TGI (20.7% TGI at day 25) compared to the mice dosed with the isotype control antibody. When the three antibodies were combined, TGI increased to 58.3% at day 25, which was statistically and significantly efficacious compared to the dual combination (p<0.001 by two-way ANOVA at day 25). Although none of the mice were tumor free (CR) by the end of the study (day 28), the enhanced efficacy in triple combination was associated with increased survival compared to dual combination. Triple blockade demonstrated significant enhancement of overall survival with 90% survival at the study endpoint (day 28). In addition to the antitumor efficacy reported here, there was no significant body weight changes in all groups observed (data not shown). Taken together, the triple combination was well tolerated and produced a superior antitumor effect in colon carcinoma in vivo compared to the dual combination of TIGIT and PVRIG blockade alone.

[0879] See, FIG. 61.

The application's sequence listing, which the Patent Office published only in electronic form, follows.

SEQUENCE LISTING (1855 sequences)

SEQ ID NO: 1 - protein, 330 aa, Homo sapiens
ASTKGPSVFPLAPSSKSTSGGTAALGCLVKDYFPEPVTVSWNSGALTSGVHTFPAVLQSSGLYSLSSVVTVPSSSLGTQTYICNVNHKPSNTKVDKKVEPKSCDKTHTCPPCPAPELLGGPSVFLFPPKPKDTLMISRTPEVTCVVVDVSHEDPEVKFNWYVDGVEVHNAKTKPREEQYNSTYRVVSVLTVLHQDWLNGKEYKCKVSNKALPAPIEKTISKAKGQPREPQVYTLPPSREEMTKNQVSLTCLVKGFYPSDIAVEWESNGQPENNYKTTPPVLDSDGSFFLYSKLTVDKSRWQQGNVFSCSVMHEALHNHYTQKSLSLSPGK

SEQ ID NO: 2 - protein, 330 aa, synthetic construct
  REGION 1..330: note = source = /note="Description of Artificial Sequence: Synthetic polypeptide"
ASTKGPSVFPLAPSSKSTSGGTAALGCLVKDYFPEPVTVSWNSGALTSGVHTFPAVLQSSGLYSLSSVVTVPSSSLGTQTYICNVNHKPSNTKVDKKVEPKSCDKTHTCPPCPAPELLGGPSVFLFPPKPKDTLMISRTPEVTCVVVAVSHEDPEVKFNWYVDGVEVHNAKTKPREEQYNSTYRVVSVLTVLHQDWLNGKEYKCKVSNKALPAPIEKTISKAKGQPREPQVYTLPPSREEMTKNQVSLTCLVKGFYPSDIAVEWESNGQPENNYKTTPPVLDSDGSFFLYSKLTVDKSRWQQGNVFSCSVMHEALHNHYTQKSLSLSPGK

SEQ ID NO: 3 - protein, 330 aa, synthetic construct
  REGION 1..330: note = source = /note="Description of Artificial Sequence: Synthetic polypeptide"
ASTKGPSVFPLAPSSKSTSGGTAALGCLVKDYFPEPVTVSWNSGALTSGVHTFPAVLQSSGLYSLSSVVTVPSSSLGTQTYICNVNHKPSNTKVDKKVEPKSCDKTHTCPPCPAPELLGGPSVFLFPPKPKDTLMISRTPEVTCVVVDVSHEDPEVKFNWYVDGVEVHNAKTKPREEQYASTYRVVSVLTVLHQDWLNGKEYKCKVSNKALPAPIEKTISKAKGQPREPQVYTLPPSREEMTKNQVSLTCLVKGFYPSDIAVEWESNGQPENNYKTTPPVLDSDGSFFLYSKLTVDKSRWQQGNVFSCSVMHEALHNHYTQKSLSLSPGK

SEQ ID NO: 4 - protein, 326 aa, Homo sapiens
ASTKGPSVFPLAPCSRSTSESTAALGCLVKDYFPEPVTVSWNSGALTSGVHTFPAVLQSSGLYSLSSVVTVPSSNFGTQTYTCNVDHKPSNTKVDKTVERKCCVECPPCPAPPVAGPSVFLFPPKPKDTLMISRTPEVTCVVVDVSHEDPEVQFNWYVDGVEVHNAKTKPREEQFNSTFRVVSVLTVVHQDWLNGKEYKCKVSNKGLPAPIEKTISKTKGQPREPQVYTLPPSREEMTKNQVSLTCLVKGFYPSDIAVEWESNGQPENNYKTTPPMLDSDGSFFLYSKLTVDKSRWQQGNVFSCSVMHEALHNHYTQKSLSLSPGK

SEQ ID NO: 5 - protein, 377 aa, Homo sapiens
ASTKGPSVFPLAPCSRSTSGGTAALGCLVKDYFPEPVTVSWNSGALTSGVHTFPAVLQSSGLYSLSSVVTVPSSSLGTQTYTCNVNHKPSNTKVDKRVELKTPLGDTTHTCPRCPEPKSCDTPPPCPRCPEPKSCDTPPPCPRCPEPKSCDTPPPCPRCPAPELLGGPSVFLFPPKPKDTLMISRTPEVTCVVVDVSHEDPEVQFKWYVDGVEVHNAKTKPREEQYNSTFRVVSVLTVLHQDWLNGKEYKCKVSNKALPAPIEKTISKTKGQPREPQVYTLPPSREEMTKNQVSLTCLVKGFYPSDIAVEWESSGQPENNYNTTPPMLDSDGSFFLYSKLTVDKSRWQQGNIFSCSVMHEALHNRFTQKSLSLSPGK

SEQ ID NO: 6 - protein, 327 aa, Homo sapiens
ASTKGPSVFPLAPCSRSTSESTAALGCLVKDYFPEPVTVSWNSGALTSGVHTFPAVLQSSGLYSLSSVVTVPSSSLGTKTYTCNVDHKPSNTKVDKRVESKYGPPCPSCPAPEFLGGPSVFLFPPKPKDTLMISRTPEVTCVVVDVSQEDPEVQFNWYVDGVEVHNAKTKPREEQFNSTYRVVSVLTVLHQDWLNGKEYKCKVSNKGLPSSIEKTISKAKGQPREPQVYTLPPSQEEMTKNQVSLTCLVKGFYPSDIAVEWESNGQPENNYKTTPPVLDSDGSFFLYSRLTVDKSRWQEGNVFSCSVMHEALHNHYTQKSLSLSPGK

SEQ ID NO: 7 - protein, 327 aa, synthetic construct
  REGION 1..327: note = source = /note="Description of Artificial Sequence: Synthetic polypeptide"
ASTKGPSVFPLAPCSRSTSESTAALGCLVKDYFPEPVTVSWNSGALTSGVHTFPAVLQSSGLYSLSSVVTVPSSSLGTKTYTCNVDHKPSNTKVDKRVESKYGPPCPPCPAPEFLGGPSVFLFPPKPKDTLMISRTPEVTCVVVDVSQEDPEVQFNWYVDGVEVHNAKTKPREEQFNSTYRVVSVLTVLHQDWLNGKEYKCKVSNKGLPSSIEKTISKAKGQPREPQVYTLPPSQEEMTKNQVSLTCLVKGFYPSDIAVEWESNGQPENNYKTTPPVLDSDGSFFLYSRLTVDKSRWQEGNVFSCSVMHEALHNHYTQKSLSLSPGK

SEQ ID NO: 8 - protein, 107 aa, Homo sapiens [sequence omitted]

SEQ ID NO: 9 - protein, 106 aa, Homo sapiens
GQPKAAPSVTLFPPSSEELQANKATLVCLISDFYPGAVTVAWKADSSPVKAGVETTTPSKQSNNKYAASSYLSLTPEQWKSHRSYSCQVTHEGSTVEKTVAPTECS

SEQ ID NO: 10 - protein, 120 aa, Homo sapiens
MMTGTIETTGNISAEKGGSIILQCHLSSTTAQVTQVNWEQQDQLLAICNADLGWHISPSFKDRVAPGPGLGLTLQSLTVNDTGEYFCIYHTYPDGTYTGRIFLEVLESSVAEHGARFQIP

SEQ ID NO: 11 - protein, 121 aa, Macaca fascicularis
MMTGTIETTGNISAKKGGSVILQCHLSSTMAQVTQVNWEQHDHSLLAIRNAELGWHIYPAFKDRVAPGPGLGLTLQSLTMNDTGEYFCTYHTYPDGTYRGRIFLEVLESSVAEHSARFQIP

SEQ ID NO: 12 - protein, 131 aa, Homo sapiens
TPEVWVQVRMEATELSSFTIRCGFLGSGSISLVTVSWGGPNGAGGTTLAVLHPERGIRQWAPARQARWETQSSISLILEGSGASSPCANTTFCCKFASFPEGSWEACGSLPPSSDPGLSAPPTPAPILRAD

SEQ ID NO: 13 - protein, 131 aa, Macaca fascicularis
TPEVWVQVQMEATELSSFTVHCGFLGPGSISLVTVSWGGPDGAGGTKLAVLHPELGTRQWAPARQARWETQSSISLALEDSGASSPFANTTFCCKFASFPEGSWESCGSLPPSSDPGLSAPPTPVPILRAD

SEQ ID NO: 14 - protein, 150 aa, Homo sapiens [sequence omitted]

SEQ ID NO: 15 - protein, 150 aa, Macaca fascicularis
PGWFLESPDRPWNAPTFSPALLLVTEGDNATFTCSFSNASESFVLNWYRMSPSNQTDKLAAFPEDRSQPGQDCRFRVTRLPNGRDFHMSVVRARRNDSGTYLCGAISLAPKAQIKESLRAELRVTERRAEVPTAHPSPSPRPAGQFQALV

SEQ ID NO: 16 - protein, 121 aa, synthetic construct
  REGION 1..121: note = source = /note="Description of Artificial Sequence: Synthetic polypeptide"
QVQLVESGGGLVQPGGSLRLSCAASGFTFSSYGMHWVRQAPGKGLEWVAFIRYDGSNKYYADSVKGRFTISRDNSKNTLYLQMNSLRAEDTAVYYCAKEMLVQDYYYMDVWGQGTTVTVSS

SEQ ID NO: 17 - protein, 8 aa, synthetic construct
  REGION 1..8: note = source = /note="Description of Artificial Sequence: Synthetic peptide"
GFTFSSYG

SEQ ID NO: 18 - protein, 8 aa, synthetic construct
  REGION 1..8: note = source = /note="Description of Artificial Sequence: Synthetic peptide"
IRYDGSNK

SEQ ID NO: 19 - protein, 14 aa, synthetic construct
  REGION 1..14: note = source = /note="Description of Artificial Sequence: Synthetic peptide"
AKEMLVQDYYYMDV

SEQ ID NO: 20 - protein, 448 aa, synthetic construct
  REGION 1..448: note = source = /note="Description of Artificial Sequence: Synthetic polypeptide"
QVQLVESGGGLVQPGGSLRLSCAASGFTFSSYGMHWVRQAPGKGLEWVAFIRYDGSNKYYADSVKGRFTISRDNSKNTLYLQMNSLRAEDTAVYYCAKEMLVQDYYYMDVWGQGTTVTVSSASTKGPSVFPLAPCSRSTSESTAALGCLVKDYFPEPVTVSWNSGALTSGVHTFPAVLQSSGLYSLSSVVTVPSSSLGTKTYTCNVDHKPSNTKVDKRVESKYGPPCPPCPAPEFLGGPSVFLFPPKPKDTLMISRTPEVTCVVVDVSQEDPEVQFNWYVDGVEVHNAKTKPREEQFNSTYRVVSVLTVLHQDWLNGKEYKCKVSNKGLPSSIEKTISKAKGQPREPQVYTLPPSQEEMTKNQVSLTCLVKGFYPSDIAVEWESNGQPENNYKTTPPVLDSDGSFFLYSRLTVDKSRWQEGNVFSCSVMHEALHNHYTQKSLSLSPGK

SEQ ID NO: 21 - protein, 113 aa, synthetic construct
  REGION 1..113: note = source = /note="Description of Artificial Sequence: Synthetic polypeptide"
DVVMTQSPLSLPVSPGEPASISCRSSQNLLHRNGINYLNWYLQKPGQSPQLLIYWGSNRASGVPDRFSGSGSGTDFTLKISRVEAEDVGVYYCMQGLQIPPTFGQGTKVDIKR

SEQ ID NO: 22 - protein, 11 aa, synthetic construct
  REGION 1..11: note = source = /note="Description of Artificial Sequence: Synthetic peptide"
QNLLHRNGINY

SEQ ID NO: 23 - skipped

SEQ ID NO: 24 - protein, 9 aa, synthetic construct
  REGION 1..9: note = source = /note="Description of Artificial Sequence: Synthetic peptide"
MQGLQIPPT

SEQ ID NO: 25 - protein, 219 aa, synthetic construct
  REGION 1..219: note = source = /note="Description of Artificial Sequence: Synthetic polypeptide"
DVVMTQSPLSLPVSPGEPASISCRSSQNLLHRNGINYLNWYLQKPGQSPQLLIYWGSNRASGVPDRFSGSGSGTDFTLKISRVEAEDVGVYYCMQGLQIPPTFGQGTKVDIKRTVAAPSVFIFPPSDEQLKSGTASVVCLLNNFYPREAKVQWKVDNALQSGNSQESVTEQDSKDSTYSLSSTLTLSKADYEKHKVYACEVTHQGLSSPVTKSFNRGEC

SEQ ID NO: 26 - protein, 121 aa, synthetic construct
  REGION 1..121: note = source = /note="Description of Artificial Sequence: Synthetic polypeptide"
EVQLVETGGGLIQPGRSLRLSCAASGFTFSSYAMHWVRQAPGKGLEWVAVISYDGSNKYYADSVKGRFTISRDNSKNTLYLQMNSLRAEDTAVYYCARDPLPLHYYGMDVWGQGTTVTVSS

SEQ ID NO: 27 - protein, 8 aa, synthetic construct
  REGION 1..8: note = source = /note="Description of Artificial Sequence: Synthetic peptide"
GFTFSSYA

SEQ ID NO: 28 - protein, 8 aa, synthetic construct
  REGION 1..8: note = source = /note="Description of Artificial Sequence: Synthetic peptide"
ISYDGSNK

SEQ ID NO: 29 - protein, 14 aa, synthetic construct
  REGION 1..14: note = source = /note="Description of Artificial Sequence: Synthetic peptide"
ARDPLPLHYYGMDV

SEQ ID NO: 30 - protein, 448 aa, synthetic construct
  REGION 1..448: note = source = /note="Description of Artificial Sequence: Synthetic polypeptide"
EVQLVETGGGLIQPGRSLRLSCAASGFTFSSYAMHWVRQAPGKGLEWVAVISYDGSNKYYADSVKGRFTISRDNSKNTLYLQMNSLRAEDTAVYYCARDPLPLHYYGMDVWGQGTTVTVSSASTKGPSVFPLAPCSRSTSESTAALGCLVKDYFPEPVTVSWNSGALTSGVHTFPAVLQSSGLYSLSSVVTVPSSSLGTKTYTCNVDHKPSNTKVDKRVESKYGPPCPPCPAPEFLGGPSVFLFPPKPKDTLMISRTPEVTCVVVDVSQEDPEVQFNWYVDGVEVHNAKTKPREEQFNSTYRVVSVLTVLHQDWLNGKEYKCKVSNKGLPSSIEKTISKAKGQPREPQVYTLPPSQEEMTKNQVSLTCLVKGFYPSDIAVEWESNGQPENNYKTTPPVLDSDGSFFLYSRLTVDKSRWQEGNVFSCSVMHEALHNHYTQKSLSLSPGK

SEQ ID NO: 31 - protein, 111 aa, synthetic construct
  REGION 1..111: note = source = /note="Description of Artificial Sequence: Synthetic polypeptide"
QSALTQPRSASGNPGQRVTISCSGSSSNMGRRPVNWYQQIPGTAPKLLIYSQNQRPSGVPDRFSGSQSGTSASLTISGLQSEDEAEYFCAVWDDSLSSLQLGGGTQLAVLG

SEQ ID NO: 32 - protein, 8 aa, synthetic construct
  REGION 1..8: note = source = /note="Description of Artificial Sequence: Synthetic peptide"
SSNMGRRP

SEQ ID NO: 33 - skipped

SEQ ID NO: 34 - protein, 11 aa, synthetic construct
  REGION 1..11: note = source = /note="Description of Artificial Sequence: Synthetic peptide"
AVWDDSLSSLQ

SEQ ID NO: 35 - protein, 216 aa, synthetic construct
  REGION 1..216: note = source = /note="Description of Artificial Sequence: Synthetic polypeptide"
QSALTQPRSASGNPGQRVTISCSGSSSNMGRRPVNWYQQIPGTAPKLLIYSQNQRPSGVPDRFSGSQSGTSASLTISGLQSEDEAEYFCAVWDDSLSSLQLGGGTQLAVLGQPKAAPSVTLFPPSSEELQANKATLVCLISDFYPGAVTVAWKADSSPVKAGVETTTPSKQSNNKYAASSYLSLTPEQWKSHRSYSCQVTHEGSTVEKTVAPTECS

SEQ ID NO: 36 - protein, 121 aa, synthetic construct; identical to SEQ ID NO: 26
  REGION 1..121: note = source = /note="Description of Artificial Sequence: Synthetic polypeptide"

SEQ ID NO: 37 - protein, 8 aa, synthetic construct
  REGION 1..8: note = source = /note="Description of Artificial Sequence: Synthetic peptide"
GFTFSSYA

SEQ ID NO: 38 - protein, 8 aa, synthetic construct
  REGION 1..8: note = source = /note="Description of Artificial Sequence: Synthetic peptide"
ISYDGSNK

SEQ ID NO: 39 - protein, 14 aa, synthetic construct
  REGION 1..14: note = source = /note="Description of Artificial Sequence: Synthetic peptide"
ARDPLPLHYYGMDV

SEQ ID NO: 40 - protein, 448 aa, synthetic construct; identical to SEQ ID NO: 30
  REGION 1..448: note = source = /note="Description of Artificial Sequence: Synthetic polypeptide"

SEQ ID NO: 41 - protein, 111 aa, synthetic construct
  REGION 1..111: note = source = /note="Description of Artificial Sequence: Synthetic polypeptide"
QSALTQPRSASGNPGQRVTISCSGSSSNMGRRPVNWYQQIPGTAPKLLIYSQNQRPSGVPDRFSGSQSGTSASLTISGLQSEDEAEYFCAVWDDSLFSLLLGGGTQLAVLG

SEQ ID NO: 42 - protein, 8 aa, synthetic construct
  REGION 1..8: note = source = /note="Description of Artificial Sequence: Synthetic peptide"
SSNMGRRP

SEQ ID NO: 43 - skipped

SEQ ID NO: 44 - protein, 11 aa, synthetic construct
  REGION 1..11: note = source = /note="Description of Artificial Sequence: Synthetic peptide"
AVWDDSLFSLL

SEQ ID NO: 45 - protein, 216 aa, synthetic construct
  REGION 1..216: note = source = /note="Description of Artificial Sequence: Synthetic polypeptide"
QSALTQPRSASGNPGQRVTISCSGSSSNMGRRPVNWYQQIPGTAPKLLIYSQNQRPSGVPDRFSGSQSGTSASLTISGLQSEDEAEYFCAVWDDSLFSLLLGGGTQLAVLGQPKAAPSVTLFPPSSEELQANKATLVCLISDFYPGAVTVAWKADSSPVKAGVETTTPSKQSNNKYAASSYLSLTPEQWKSHRSYSCQVTHEGSTVEKTVAPTECS

SEQ ID NO: 46 - protein, 121 aa, synthetic construct
  REGION 1..121: note = source = /note="Description of Artificial Sequence: Synthetic polypeptide"
QVQLQESGPGLVKPSETLSLTCTVSGGSISSSSYYWGWIRQPPGKGLEWIGSIYYSGSTYYNPSLKSRVTISVDTSKNQFSLKLSSVTAADTAVYYCARQGAAAGNPFDIWGQGTMVTVSS

SEQ ID NO: 47 - protein, 10 aa, synthetic construct
  REGION 1..10: note = source = /note="Description of Artificial Sequence: Synthetic peptide"
GGSISSSSYY

SEQ ID NO: 48 - protein, 7 aa, synthetic construct
  REGION 1..7: note = source = /note="Description of Artificial Sequence: Synthetic peptide"
IYYSGST

SEQ ID NO: 49 - protein, 13 aa, synthetic construct
  REGION 1..13: note = source = /note="Description of Artificial Sequence: Synthetic peptide"
ARQGAAAGNPFDI

SEQ ID NO: 50 - protein, 448 aa, synthetic construct
  REGION 1..448: note = source = /note="Description of Artificial Sequence: Synthetic polypeptide"
QVQLQESGPGLVKPSETLSLTCTVSGGSISSSSYYWGWIRQPPGKGLEWIGSIYYSGSTYYNPSLKSRVTISVDTSKNQFSLKLSSVTAADTAVYYCARQGAAAGNPFDIWGQGTMVTVSSASTKGPSVFPLAPCSRSTSESTAALGCLVKDYFPEPVTVSWNSGALTSGVHTFPAVLQSSGLYSLSSVVTVPSSSLGTKTYTCNVDHKPSNTKVDKRVESKYGPPCPPCPAPEFLGGPSVFLFPPKPKDTLMISRTPEVTCVVVDVSQEDPEVQFNWYVDGVEVHNAKTKPREEQFNSTYRVVSVLTVLHQDWLNGKEYKCKVSNKGLPSSIEKTISKAKGQPREPQVYTLPPSQEEMTKNQVSLTCLVKGFYPSDIAVEWESNGQPENNYKTTPPVLDSDGSFFLYSRLTVDKSRWQEGNVFSCSVMHEALHNHYTQKSLSLSPGK

SEQ ID NO: 51 - protein, 111 aa, synthetic construct
  REGION 1..111: note = source = /note="Description of Artificial Sequence: Synthetic polypeptide"
QSVLTQPPSVSGTPGQRVTISCSGSSSNIGSNFVYWHQQLTGTAPKLLIYRNTQRPSGVPDRFSGSKSGTSASLAIGGLRSEDEADYYCATWDDSLSAWVFGGGTKLTVLG

SEQ ID NO: 52 - protein, 8 aa, synthetic construct
  REGION 1..8: note = source = /note="Description of Artificial Sequence: Synthetic peptide"
SSNIGSNF

SEQ ID NO: 53 - skipped

SEQ ID NO: 54 - protein, 11 aa, synthetic construct
  REGION 1..11: note = source = /note="Description of Artificial Sequence: Synthetic peptide"
ATWDDSLSAWV

SEQ ID NO: 55 - protein, 216 aa, synthetic construct
  REGION 1..216: note = source = /note="Description of Artificial Sequence: Synthetic polypeptide"
QSVLTQPPSVSGTPGQRVTISCSGSSSNIGSNFVYWHQQLTGTAPKLLIYRNTQRPSGVPDRFSGSKSGTSASLAIGGLRSEDEADYYCATWDDSLSAWVFGGGTKLTVLGQPKAAPSVTLFPPSSEELQANKATLVCLISDFYPGAVTVAWKADSSPVKAGVETTTPSKQSNNKYAASSYLSLTPEQWKSHRSYSCQVTHEGSTVEKTVAPTECS

SEQ ID NO: 56 - protein, 119 aa, synthetic construct
  REGION 1..119: note = source = /note="Description of Artificial Sequence: Synthetic polypeptide"
EVQLVETGGGLIQPGGSLRLSCAASGFTVSSNYMSWVRQAPGKGLEWVSVIYSGGSTYYADSVKGRFTISRDNSKNTLYLQMNSLRAEDTAVYYCARGARYSYGQYPYWGQGTLVTVSS

SEQ ID NO: 57 - protein, 8 aa, synthetic construct
  REGION 1..8: note = source = /note="Description of Artificial Sequence: Synthetic peptide"
GFTVSSNY

SEQ ID NO: 58 - protein, 7 aa, synthetic construct
  REGION 1..7: note = source = /note="Description of Artificial Sequence: Synthetic peptide"
IYSGGST

SEQ ID NO: 59 - protein, 13 aa, synthetic construct
  REGION 1..13: note = source = /note="Description of Artificial Sequence: Synthetic peptide"
ARGARYSYGQYPY

SEQ ID NO: 60 - protein, 446 aa, synthetic construct
  REGION 1..446: note = source = /note="Description of Artificial Sequence: Synthetic polypeptide"
EVQLVETGGGLIQPGGSLRLSCAASGFTVSSNYMSWVRQAPGKGLEWVSVIYSGGSTYYADSVKGRFTISRDNSKNTLYLQMNSLRAEDTAVYYCARGARYSYGQYPYWGQGTLVTVSSASTKGPSVFPLAPCSRSTSESTAALGCLVKDYFPEPVTVSWNSGALTSGVHTFPAVLQSSGLYSLSSVVTVPSSSLGTKTYTCNVDHKPSNTKVDKRVESKYGPPCPPCPAPEFLGGPSVFLFPPKPKDTLMISRTPEVTCVVVDVSQEDPEVQFNWYVDGVEVHNAKTKPREEQFNSTYRVVSVLTVLHQDWLNGKEYKCKVSNKGLPSSIEKTISKAKGQPREPQVYTLPPSQEEMTKNQVSLTCLVKGFYPSDIAVEWESNGQPENNYKTTPPVLDSDGSFFLYSRLTVDKSRWQEGNVFSCSVMHEALHNHYTQKSLSLSPGK

SEQ ID NO: 61 - protein, 109 aa, synthetic construct
  REGION 1..109: note = source = /note="Description of Artificial Sequence: Synthetic polypeptide"
DIQLTQSPSFLSASVGDRVTITCRASHDISSLFSWYQQKPGKAPKLLIYAASTLQTGVPSRFSGSASGTEFTLTISSLQPEDFATYYCLQLDSFPTWTFGQGTKVEIKR

SEQ ID NO: 62 - protein, 6 aa, synthetic construct
  REGION 1..6: note = source = /note="Description of Artificial Sequence: Synthetic peptide"
HDISSL

SEQ ID NO: 63 - skipped

SEQ ID NO: 64 - protein, 10 aa, synthetic construct
  REGION 1..10: note = source = /note="Description of Artificial Sequence: Synthetic peptide"
LQLDSFPTWT

SEQ ID NO: 65 - protein, 215 aa, synthetic construct
  REGION 1..215: note = source = /note="Description of Artificial Sequence: Synthetic polypeptide"
DIQLTQSPSFLSASVGDRVTITCRASHDISSLFSWYQQKPGKAPKLLIYAASTLQTGVPSRFSGSASGTEFTLTISSLQPEDFATYYCLQLDSFPTWTFGQGTKVEIKRTVAAPSVFIFPPSDEQLKSGTASVVCLLNNFYPREAKVQWKVDNALQSGNSQESVTEQDSKDSTYSLSSTLTLSKADYEKHKVYACEVTHQGLSSPVTKSFNRGEC

SEQ ID NO: 66 - protein, 121 aa, synthetic construct
  REGION 1..121: note = source = /note="Description of Artificial Sequence: Synthetic polypeptide"
EVQLVETGGGLIQPGRSLRLSCAASGFTFSSYAMHWVRQAPGKGLEWVAVISYDGTPVYYADSVKGRFTISRDNSKNTLYLQMNSLRAEDTAVYYCARDPLPLHYYGMDVWGQGTTVTVSS

SEQ ID NO: 67 - protein, 8 aa, synthetic construct
  REGION 1..8: note = source = /note="Description of Artificial Sequence: Synthetic peptide"
GFTFSSYA

SEQ ID NO: 68 - protein, 8 aa, synthetic construct
  REGION 1..8: note = source = /note="Description of Artificial Sequence: Synthetic peptide"
ISYDGTPV

SEQ ID NO: 69 - protein, 14 aa, synthetic construct
  REGION 1..14: note = source = /note="Description of Artificial Sequence: Synthetic peptide"
ARDPLPLHYYGMDV

SEQ ID NO: 70 - protein, 448 aa, synthetic construct
  REGION 1..448: note = source = /note="Description of Artificial Sequence: Synthetic polypeptide"
EVQLVETGGGLIQPGRSLRLSCAASGFTFSSYAMHWVRQAPGKGLEWVAVISYDGTPVYYADSVKGRFTISRDNSKNTLYLQMNSLRAEDTAVYYCARDPLPLHYYGMDVWGQGTTVTVSSASTKGPSVFPLAPCSRSTSESTAALGCLVKDYFPEPVTVSWNSGALTSGVHTFPAVLQSSGLYSLSSVVTVPSSSLGTKTYTCNVDHKPSNTKVDKRVESKYGPPCPPCPAPEFLGGPSVFLFPPKPKDTLMISRTPEVTCVVVDVSQEDPEVQFNWYVDGVEVHNAKTKPREEQFNSTYRVVSVLTVLHQDWLNGKEYKCKVSNKGLPSSIEKTISKAKGQPREPQVYTLPPSQEEMTKNQVSLTCLVKGFYPSDIAVEWESNGQPENNYKTTPPVLDSDGSFFLYSRLTVDKSRWQEGNVFSCSVMHEALHNHYTQKSLSLSPGK

SEQ ID NO: 71 - protein, 111 aa, synthetic construct
  REGION 1..111: note = source = /note="Description of Artificial Sequence: Synthetic polypeptide"
QSALTQPRSASGNPGQRVTISCSGSSSNMGRRPVNWYQQIPGTAPKLLIYSQNQRPSGVPDRFSGSQSGTSASLTISGLQSEDEAEYFCAVWDGDRRSLQLGGGTQLAVLG

SEQ ID NO: 72 - protein, 8 aa, synthetic construct
  REGION 1..8: note = source = /note="Description of Artificial Sequence: Synthetic peptide"
SSNMGRRP

SEQ ID NO: 73 - skipped

SEQ ID NO: 74 - protein, 11 aa, synthetic construct
  REGION 1..11: note = source = /note="Description of Artificial Sequence: Synthetic peptide"
AVWDGDRRSLQ

SEQ ID NO: 75 - protein, 216 aa, synthetic construct
  REGION 1..216: note = source = /note="Description of Artificial Sequence: Synthetic polypeptide"
QSALTQPRSASGNPGQRVTISCSGSSSNMGRRPVNWYQQIPGTAPKLLIYSQNQRPSGVPDRFSGSQSGTSASLTISGLQSEDEAEYFCAVWDGDRRSLQLGGGTQLAVLGQPKAAPSVTLFPPSSEELQANKATLVCLISDFYPGAVTVAWKADSSPVKAGVETTTPSKQSNNKYAASSYLSLTPEQWKSHRSYSCQVTHEGSTVEKTVAPTECS

SEQ ID NO: 76 - protein, 121 aa, synthetic construct
  REGION 1..121: note = source = /note="Description of Artificial Sequence: Synthetic polypeptide"
EVQLVETGGGLIQPGRSLRLSCAASGFTFSSYAMHWVRQAPGKGLEWVAVISYAGEVKYYADSVKGRFTISRDNSKNTLYLQMNSLRAEDTAVYYCARDPLPLHYYGMDVWGQGTTVTVSS

SEQ ID NO: 77 - protein, 8 aa, synthetic construct
  REGION 1..8: note = source = /note="Description of Artificial Sequence: Synthetic peptide"
GFTFSSYA

SEQ ID NO: 78 - protein, 8 aa, synthetic construct
  REGION 1..8: note = source = /note="Description of Artificial Sequence: Synthetic peptide"
ISYAGEVK

SEQ ID NO: 79 - protein, 14 aa, synthetic construct
  REGION 1..14: note = source = /note="Description of Artificial Sequence: Synthetic peptide"
ARDPLPLHYYGMDV

SEQ ID NO: 80 - protein, 448 aa, synthetic construct
  REGION 1..448: note = source = /note="Description of Artificial Sequence: Synthetic polypeptide"
EVQLVETGGGLIQPGRSLRLSCAASGFTFSSYAMHWVRQAPGKGLEWVAVISYAGEVKYYADSVKGRFTISRDNSKNTLYLQMNSLRAEDTAVYYCARDPLPLHYYGMDVWGQGTTVTVSSASTKGPSVFPLAPCSRSTSESTAALGCLVKDYFPEPVTVSWNSGALTSGVHTFPAVLQSSGLYSLSSVVTVPSSSLGTKTYTCNVDHKPSNTKVDKRVESKYGPPCPPCPAPEFLGGPSVFLFPPKPKDTLMISRTPEVTCVVVDVSQEDPEVQFNWYVDGVEVHNAKTKPREEQFNSTYRVVSVLTVLHQDWLNGKEYKCKVSNKGLPSSIEKTISKAKGQPREPQVYTLPPSQEEMTKNQVSLTCLVKGFYPSDIAVEWESNGQPENNYKTTPPVLDSDGSFFLYSRLTVDKSRWQEGNVFSCSVMHEALHNHYTQKSLSLSPGK

SEQ ID NO: 81 - protein, 111 aa, synthetic construct
  REGION 1..111: note = source = /note="Description of Artificial Sequence: Synthetic polypeptide"
QSALTQPRSASGNPGQRVTISCSGSSSNMGRRPVNWYQQIPGTAPKLLIYSQNQRPSGVPDRFSGSQSGTSASLTISGLQSEDEAEYFCAVWDDIGRVLQLGGGTQLAVLG

SEQ ID NO: 82 - protein, 8 aa, synthetic construct
  REGION 1..8: note = source = /note="Description of Artificial Sequence: Synthetic peptide"
SSNMGRRP

SEQ ID NO: 83 - skipped

SEQ ID NO: 84 - protein, 11 aa, synthetic construct
  REGION 1..11: note = source = /note="Description of Artificial Sequence: Synthetic peptide"
AVWDDIGRVLQ

SEQ ID NO: 85 - protein, 216 aa, synthetic construct
  REGION 1..216: note = source = /note="Description of Artificial Sequence: Synthetic polypeptide"
QSALTQPRSASGNPGQRVTISCSGSSSNMGRRPVNWYQQIPGTAPKLLIYSQNQRPSGVPDRFSGSQSGTSASLTISGLQSEDEAEYFCAVWDDIGRVLQLGGGTQLAVLGQPKAAPSVTLFPPSSEELQANKATLVCLISDFYPGAVTVAWKADSSPVKAGVETTTPSKQSNNKYAASSYLSLTPEQWKSHRSYSCQVTHEGSTVEKTVAPTECS

SEQ ID NO: 86 - protein, 121 aa, synthetic construct
  REGION 1..121: note = source = /note="Description of Artificial Sequence: Synthetic polypeptide"
EVQLVETGGGLIQPGRSLRLSCAASGFTFSSYAMHWVRQAPGKGLEWVAVISYDRTPVYYADSVKGRFTISRDNSKNTLYLQMNSLRAEDTAVYYCARDPLPLHYYGMDVWGQGTTVTVSS

SEQ ID NO: 87 - protein, 8 aa, synthetic construct
  REGION 1..8: note = source = /note="Description of Artificial Sequence: Synthetic peptide"
GFTFSSYA

SEQ ID NO: 88 - protein, 8 aa, synthetic construct
  REGION 1..8: note = source = /note="Description of Artificial Sequence: Synthetic peptide"
ISYDRTPV

SEQ ID NO: 89 - protein, 14 aa, synthetic construct
  REGION 1..14: note = source = /note="Description of Artificial Sequence: Synthetic peptide"
ARDPLPLHYYGMDV

SEQ ID NO: 90 - protein, 448 aa, synthetic construct
  REGION 1..448: note = source = /note="Description of Artificial Sequence: Synthetic polypeptide"
EVQLVETGGGLIQPGRSLRLSCAASGFTFSSYAMHWVRQAPGKGLEWVAVISYDRTPVYYADSVKGRFTISRDNSKNTLYLQMNSLRAEDTAVYYCARDPLPLHYYGMDVWGQGTTVTVSSASTKGPSVFPLAPCSRSTSESTAALGCLVKDYFPEPVTVSWNSGALTSGVHTFPAVLQSSGLYSLSSVVTVPSSSLGTKTYTCNVDHKPSNTKVDKRVESKYGPPCPPCPAPEFLGGPSVFLFPPKPKDTLMISRTPEVTCVVVDVSQEDPEVQFNWYVDGVEVHNAKTKPREEQFNSTYRVVSVLTVLHQDWLNGKEYKCKVSNKGLPSSIEKTISKAKGQPREPQVYTLPPSQEEMTKNQVSLTCLVKGFYPSDIAVEWESNGQPENNYKTTPPVLDSDGSFFLYSRLTVDKSRWQEGNVFSCSVMHEALHNHYTQKSLSLSPGK

SEQ ID NO: 91 - protein, 111 aa, synthetic construct
  REGION 1..111: note = source = /note="Description of Artificial Sequence: Synthetic polypeptide"
QSALTQPRSASGNPGQRVTISCSGSSSNMGRRPVNWYQQIPGTAPKLLIYSQNQRPSGVPDRFSGSQSGTSASLTISGLQSEDEAEYFCATWDDSLPRLNFGGGTKLAVLG

SEQ ID NO: 92 - protein, 8 aa, synthetic construct
  REGION 1..8: note = source = /note="Description of Artificial Sequence: Synthetic peptide"
SSNMGRRP

SEQ ID NO: 93 - skipped

SEQ ID NO: 94 - protein, 11 aa, synthetic construct
  REGION 1..11: note = source = /note="Description of Artificial Sequence: Synthetic peptide"
ATWDDSLPRLN

SEQ ID NO: 95 - protein, 216 aa, synthetic construct
  REGION 1..216: note = source = /note="Description of Artificial Sequence: Synthetic polypeptide"
QSALTQPRSASGNPGQRVTISCSGSSSNMGRRPVNWYQQIPGTAPKLLIYSQNQRPSGVPDRFSGSQSGTSASLTISGLQSEDEAEYFCATWDDSLPRLNFGGGTKLAVLGQPKAAPSVTLFPPSSEELQANKATLVCLISDFYPGAVTVAWKADSSPVKAGVETTTPSKQSNNKYAASSYLSLTPEQWKSHRSYSCQVTHEGSTVEKTVAPTECS

SEQ ID NO: 96 - protein, 121 aa, synthetic construct
  REGION 1..121: note = source = /note="Description of Artificial Sequence: Synthetic polypeptide"
EVQLVETGGGLIQPGRSLRLSCAASGFTFSSYAMHWVRQAPGKGLEWVAVISYEGDRKYYADSVKGRFTISRDNSKNTLYLQMNSLRAEDTAVYYCARDPLPLHYYGMDVWGQGTTVTVSS

SEQ ID NO: 97 - protein, 8 aa, synthetic construct
  REGION 1..8: note = source = /note="Description of Artificial Sequence: Synthetic peptide"
GFTFSSYA

SEQ ID NO: 98 - protein, 8 aa, synthetic construct
  REGION 1..8: note = source = /note="Description of Artificial Sequence: Synthetic peptide"
ISYEGDRK

SEQ ID NO: 99 - protein, 14 aa, synthetic construct
  REGION 1..14: note = source = /note="Description of Artificial Sequence: Synthetic peptide"
ARDPLPLHYYGMDV

SEQ ID NO: 100 - protein, 448 aa, synthetic construct
  REGION 1..448: note = source = /note="Description of Artificial Sequence: Synthetic polypeptide"
EVQLVETGGGLIQPGRSLRLSCAASGFTFSSYAMHWVRQAPGKGLEWVAVISYEGDRKYYADSVKGRFTISRDNSKNTLYLQMNSLRAEDTAVYYCARDPLPLHYYGMDVWGQGTTVTVSSASTKGPSVFPLAPCSRSTSESTAALGCLVKDYFPEPVTVSWNSGALTSGVHTFPAVLQSSGLYSLSSVVTVPSSSLGTKTYTCNVDHKPSNTKVDKRVESKYGPPCPPCPAPEFLGGPSVFLFPPKPKDTLMISRTPEVTCVVVDVSQEDPEVQFNWYVDGVEVHNAKTKPREEQFNSTYRVVSVLTVLHQDWLNGKEYKCKVSNKGLPSSIEKTISKAKGQPREPQVYTLPPSQEEMTKNQVSLTCLVKGFYPSDIAVEWESNGQPENNYKTTPPVLDSDGSFFLYSRLTVDKSRWQEGNVFSCSVMHEALHNHYTQKSLSLSPGK

SEQ ID NO: 101 - protein, 111 aa, synthetic construct
  REGION 1..111: note = source = /note="Description of Artificial Sequence: Synthetic polypeptide"
QSALTQPRSASGNPGQRVTISCSGSSSNMGRRPVNWYQQIPGTAPKLLIYSQNQRPSGVPDRFSGSQSGTSASLTISGLQSEDEAEYFCATWDDSTPHGVFGGGTKLAVLG

SEQ ID NO: 102 - protein, 8 aa, synthetic construct
  REGION 1..8: note = source = /note="Description of Artificial Sequence: Synthetic peptide"
SSNMGRRP

SEQ ID NO: 103 - skipped

SEQ ID NO: 104 - protein, 11 aa, synthetic construct
  REGION 1..11: note = source = /note="Description of Artificial Sequence: Synthetic peptide"
ATWDDSTPHGV

SEQ ID NO: 105 - protein, 216 aa, synthetic construct
  REGION 1..216: note = source = /note="Description of Artificial Sequence: Synthetic polypeptide"
QSALTQPRSASGNPGQRVTISCSGSSSNMGRRPVNWYQQIPGTAPKLLIYSQNQRPSGVPDRFSGSQSGTSASLTISGLQSEDEAEYFCATWDDSTPHGVFGGGTKLAVLGQPKAAPSVTLFPPSSEELQANKATLVCLISDFYPGAVTVAWKADSSPVKAGVETTTPSKQSNNKYAASSYLSLTPEQWKSHRSYSCQVTHEGSTVEKTVAPTECS

SEQ ID NO: 106 - protein, 118 aa, synthetic construct
  REGION 1..118: note = source = /note="Description of Artificial Sequence: Synthetic polypeptide"
EVQLVETGGGLIQPGGSLRLSCAASGFTVSSNYMSWVRQAPGKGLEWVSVIYSGGSTYYADSVKGRFTISRDNSKNTLYLQMNSLRAEDTAVYYCARGAPLFGQYPYWGQGTLVTVSS

SEQ ID NO: 107 - protein, 8 aa, synthetic construct
  REGION 1..8: note = source = /note="Description of Artificial Sequence: Synthetic peptide"
GFTVSSNY

SEQ ID NO: 108 - protein, 7 aa, synthetic construct
  REGION 1..7: note = source = /note="Description of Artificial Sequence: Synthetic peptide"
IYSGGST

SEQ ID NO: 109 - protein, 12 aa, synthetic construct
  REGION 1..12: note = source = /note="Description of Artificial Sequence: Synthetic peptide"
ARGAPLFGQYPY

SEQ ID NO: 110 - protein, 445 aa, synthetic construct
  REGION 1..445: note = source = /note="Description of Artificial Sequence: Synthetic polypeptide"
EVQLVETGGGLIQPGGSLRLSCAASGFTVSSNYMSWVRQAPGKGLEWVSVIYSGGSTYYADSVKGRFTISRDNSKNTLYLQMNSLRAEDTAVYYCARGAPLFGQYPYWGQGTLVTVSSASTKGPSVFPLAPCSRSTSESTAALGCLVKDYFPEPVTVSWNSGALTSGVHTFPAVLQSSGLYSLSSVVTVPSSSLGTKTYTCNVDHKPSNTKVDKRVESKYGPPCPPCPAPEFLGGPSVFLFPPKPKDTLMISRTPEVTCVVVDVSQEDPEVQFNWYVDGVEVHNAKTKPREEQFNSTYRVVSVLTVLHQDWLNGKEYKCKVSNKGLPSSIEKTISKAKGQPREPQVYTLPPSQEEMTKNQVSLTCLVKGFYPSDIAVEWESNGQPENNYKTTPPVLDSDGSFFLYSRLTVDKSRWQEGNVFSCSVMHEALHNHYTQKSLSLSPGK

SEQ ID NO: 111 - protein, 109 aa, synthetic construct
  REGION 1..109: note = source = /note="Description of Artificial Sequence: Synthetic polypeptide"
DIQMTQSPSSLSASVGDRVTITCRASHAIASLFSWYQQKPGKAPKLLIYAASTLQTGVPSRFSGSASGTEFTLTISSLQPEDFATYYCLQLDSFPTWTFGQGTKVEIKR

SEQ ID NO: 112 - protein, 6 aa, synthetic construct
  REGION 1..6: note = source = /note="Description of Artificial Sequence: Synthetic peptide"
HAIASL

SEQ ID NO: 113 - skipped

SEQ ID NO: 114 - protein, 10 aa, synthetic construct
  REGION 1..10: note = source = /note="Description of Artificial Sequence: Synthetic peptide"
LQLDSFPTWT

SEQ ID NO: 115 - protein, 215 aa, synthetic construct
  REGION 1..215: note = source = /note="Description of Artificial Sequence: Synthetic polypeptide"
DIQMTQSPSSLSASVGDRVTITCRASHAIASLFSWYQQKPGKAPKLLIYAASTLQTGVPSRFSGSASGTEFTLTISSLQPEDFATYYCLQLDSFPTWTFGQGTKVEIKRTVAAPSVFIFPPSDEQLKSGTASVVCLLNNFYPREAKVQWKVDNALQSGNSQESVTEQDSKDSTYSLSSTLTLSKADYEKHKVYACEVTHQGLSSPVTKSFNRGEC

SEQ ID NO: 116 - protein, 118 aa, synthetic construct
  REGION 1..118: note = source = /note="Description of Artificial Sequence: Synthetic polypeptide"
EVQLVETGGGLIQPGGSLRLSCAASGFTVSSNYMSWVRQAPGKGLEWVSVIYSGGSTYYADSVKGRFTISRDNSKNTLYLQMNSLRAEDTAVYYCARGARPNGQYPYWGQGTLVTVSS

SEQ ID NO: 117 - protein, 8 aa, synthetic construct
  REGION 1..8: note = source = /note="Description of Artificial Sequence: Synthetic peptide"
GFTVSSNY

SEQ ID NO: 118 - protein, 7 aa, synthetic construct
  REGION 1..7: note = source = /note="Description of Artificial Sequence: Synthetic peptide"
IYSGGST

SEQ ID NO: 119 - protein, 12 aa, synthetic construct
  REGION 1..12: note = source = /note="Description of Artificial Sequence: Synthetic peptide"
ARGARPNGQYPY

SEQ ID NO: 120 - protein, 445 aa, synthetic construct
  REGION 1..445: note = source = /note="Description of Artificial Sequence: Synthetic polypeptide"
EVQLVETGGGLIQPGGSLRLSCAASGFTVSSNYMSWVRQAPGKGLEWVSVIYSGGSTYYADSVKGRFTISRDNSKNTLYLQMNSLRAEDTAVYYCARGARPNGQYPYWGQGTLVTVSSASTKGPSVFPLAPCSRSTSESTAALGCLVKDYFPEPVTVSWNSGALTSGVHTFPAVLQSSGLYSLSSVVTVPSSSLGTKTYTCNVDHKPSNTKVDKRVESKYGPPCPPCPAPEFLGGPSVFLFPPKPKDTLMISRTPEVTCVVVDVSQEDPEVQFNWYVDGVEVHNAKTKPREEQFNSTYRVVSVLTVLHQDWLNGKEYKCKVSNKGLPSSIEKTISKAKGQPREPQVYTLPPSQEEMTKNQVSLTCLVKGFYPSDIAVEWESNGQPENNYKTTPPVLDSDGSFFLYSRLTVDKSRWQEGNVFSCSVMHEALHNHYTQKSLSLSPGK

SEQ ID NO: 121 - protein, 109 aa, synthetic construct
  REGION 1..109: note = source = /note="Description of Artificial Sequence: Synthetic polypeptide"
DIQLTQSPSFLSASVGDRVTITCRASHGIKSLFSWYQQKPGKAPKLLIYAASTLQTGVPSRFSGSASGTEFTLTISSLQPEDFATYYCLQLDSFPTWTFGQGTKVEIKR

SEQ ID NO: 122 - protein, 6 aa, synthetic construct
  REGION 1..6: note = source = /note="Description of Artificial Sequence: Synthetic peptide"
HGIKSL

SEQ ID NO: 123 - skipped

SEQ ID NO: 124 - protein, 10 aa, synthetic construct
  REGION 1..10: note = source = /note="Description of Artificial Sequence: Synthetic peptide"
LQLDSFPTWT

SEQ ID NO: 125 - protein, 215 aa, synthetic construct
  REGION 1..215: note = source = /note="Description of Artificial Sequence: Synthetic polypeptide"
DIQLTQSPSFLSASVGDRVTITCRASHGIKSLFSWYQQKPGKAPKLLIYAASTLQTGVPSRFSGSASGTEFTLTISSLQPEDFATYYCLQLDSFPTWTFGQGTKVEIKRTVAAPSVFIFPPSDEQLKSGTASVVCLLNNFYPREAKVQWKVDNALQSGNSQESVTEQDSKDSTYSLSSTLTLSKADYEKHKVYACEVTHQGLSSPVTKSFNRGEC

SEQ ID NO: 126 - protein, 119 aa, synthetic construct
  REGION 1..119: note = source = /note="Description of Artificial Sequence: Synthetic polypeptide"
EVQLQQSGPELVKPGSSVKMSCKASGYTFSSYVMHWVKQKPGQGLEWIGYIDPYNDGAKYNEKFKGKATLTSDKSSSTAYMELSSLTSEDSAVYYCARGGPYGWYFDVWGAGTTVTVSS

SEQ ID NO: 127 - protein, 8 aa, synthetic construct
  REGION 1..8: note = source = /note="Description of Artificial Sequence: Synthetic peptide"
GYTFSSYV

SEQ ID NO: 128 - protein, 8 aa, synthetic construct
  REGION 1..8: note = source = /note="Description of Artificial Sequence: Synthetic peptide"
IDPYNDGA

SEQ ID NO: 129 - protein, 12 aa, synthetic construct
  REGION 1..12: note = source = /note="Description of Artificial Sequence: Synthetic peptide"
ARGGPYGWYFDV

SEQ ID NO: 130 - protein, 446 aa, synthetic construct
  REGION 1..446: note = source = /note="Description of Artificial Sequence: Synthetic polypeptide"
EVQLQQSGPELVKPGSSVKMSCKASGYTFSSYVMHWVKQKPGQGLEWIGYIDPYNDGAKYNEKFKGKATLTSDKSSSTAYMELSSLTSEDSAVYYCARGGPYGWYFDVWGAGTTVTVSSASTKGPSVFPLAPCSRSTSESTAALGCLVKDYFPEPVTVSWNSGALTSGVHTFPAVLQSSGLYSLSSVVTVPSSSLGTKTYTCNVDHKPSNTKVDKRVESKYGPPCPPCPAPEFLGGPSVFLFPPKPKDTLMISRTPEVTCVVVDVSQEDPEVQFNWYVDGVEVHNAKTKPREEQFNSTYRVVSVLTVLHQDWLNGKEYKCKVSNKGLPSSIEKTISKAKGQPREPQVYTLPPSQEEMTKNQVSLTCLVKGFYPSDIAVEWESNGQPENNYKTTPPVLDSDGSFFLYSRLTVDKSRWQEGNVFSCSVMHEALHNHYTQKSLSLSPGK

SEQ ID NO: 131 - protein, 107 aa, synthetic construct
  REGION 1..107: note = source = /note="Description of Artificial Sequence: Synthetic polypeptide"
DIQMTQSPASLSASVGETVTITCRASEHIYSYLSWYQQKQGKSPQLLVYNAKTLAEGVPSRFSGSGSGTQFSLKINSLQPEDFGTYYCQHHFGSPLTFGAGTTLELK

SEQ ID NO: 132 - protein, 6 aa, synthetic construct
  REGION 1..6: note = source = /note="Description of Artificial Sequence: Synthetic peptide"
EHIYSY

SEQ ID NO: 133 - skipped

SEQ ID NO: 134 - protein, 9 aa, synthetic construct
  REGION 1..9: note = source = /note="Description of Artificial Sequence: Synthetic peptide"
QHHFGSPLT

SEQ ID NO: 135 - protein, 214 aa, synthetic construct
  REGION 1..214: note = source = /note="Description of Artificial Sequence: Synthetic polypeptide"
DIQMTQSPASLSASVGETVTITCRASEHIYSYLSWYQQKQGKSPQLLVYNAKTLAEGVPSRFSGSGSGTQFSLKINSLQPEDFGTYYCQHHFGSPLTFGAGTTLELKRTVAAPSVFIFPPSDEQLKSGTASVVCLLNNFYPREAKVQWKVDNALQSGNSQESVTEQDSKDSTYSLSSTLTLSKADYEKHKVYACEVTHQGLSSPVTKSFNRGEC

SEQ ID NO: 136 - protein, 130 aa, synthetic construct
  REGION 1..130: note = source = /note="Description of Artificial Sequence: Synthetic polypeptide"
QVHLQESGPGLVKPSETLSLTCTVSGGSVSSGIYYWSWIRQPPGKGLEWIGYIYYSGSTNYNPSLKSRVTISVDTSKNQFSLKLSSVTAADTAVYYCARDYYVSGNYYNVDYYFFGVDVWGQGTTVTVSS

SEQ ID NO: 137 - protein, 10 aa, synthetic construct
  REGION 1..10: note = source = /note="Description of Artificial Sequence: Synthetic peptide"
GGSVSSGIYY

SEQ ID NO: 138 - protein, 7 aa, synthetic construct
  REGION 1..7: note = source = /note="Description of Artificial Sequence: Synthetic peptide"
IYYSGST

SEQ ID NO: 139 - protein, 22 aa, synthetic construct
  REGION 1..22: note = source = /note="Description of Artificial Sequence: Synthetic peptide"
ARDYYVSGNYYNVDYYFFGVDV

SEQ ID NO: 140 - protein, 457 aa, synthetic construct
  REGION 1..457: note = source = /note="Description of Artificial Sequence: Synthetic polypeptide"
QVHLQESGPGLVKPSETLSLTCTVSGGSVSSGIYYWSWIRQPPGKGLEWIGYIYYSGSTNYNPSLKSRVTISVDTSKNQFSLKLSSVTAADTAVYYCARDYYVSGNYYNVDYYFFGVDVWGQGTTVTVSSASTKGPSVFPLAPCSRSTSESTAALGCLVKDYFPEPVTVSWNSGALTSGVHTFPAVLQSSGLYSLSSVVTVPSSSLGTKTYTCNVDHKPSNTKVDKRVESKYGPPCPPCPAPEFLGGPSVFLFPPKPKDTLMISRTPEVTCVVVDVSQEDPEVQFNWYVDGVEVHNAKTKPREEQFNSTYRVVSVLTVLHQDWLNGKEYKCKVSNKGLPSSIEKTISKAKGQPREPQVYTLPPSQEEMTKNQVSLTCLVKGFYPSDIAVEWESNGQPENNYKTTPPVLDSDGSFFLYSRLTVDKSRWQEGNVFSCSVMHEALHNHYTQKSLSLSPGK

SEQ ID NO: 141 - protein, 109 aa, synthetic construct
  REGION 1..109: note = source = /note="Description of Artificial Sequence: Synthetic polypeptide"
EIVLTQSPATLSLSPGERATLSCRASQSVSSYLAWYQQKPGQAPRLLIYDASNRATGIPARFSGSGSGTDFTLTISSLEPEDFAVYYCQQRSNWPPLFTFGPGTKVDIK

SEQ ID NO: 142 - protein, 6 aa, synthetic construct
  REGION 1..6: note = source = /note="Description of Artificial Sequence: Synthetic peptide"
QSVSSY

SEQ ID NO: 143 - skipped

SEQ ID NO: 144 - protein, 11 aa, synthetic construct
  REGION 1..11: note = source = /note="Description of Artificial Sequence: Synthetic peptide"
QQRSNWPPLFT

SEQ ID NO: 145 - protein, 216 aa, synthetic construct
  REGION 1..216: note = source = /note="Description of Artificial Sequence: Synthetic polypeptide"
EIVLTQSPATLSLSPGERATLSCRASQSVSSYLAWYQQKPGQAPRLLIYDASNRATGIPARFSGSGSGTDFTLTISSLEPEDFAVYYCQQRSNWPPLFTFGPGTKVDIKRTVAAPSVFIFPPSDEQLKSGTASVVCLLNNFYPREAKVQWKVDNALQSGNSQESVTEQDSKDSTYSLSSTLTLSKADYEKHKVYACEVTHQGLSSPVTKSFNRGEC

SEQ ID NO: 146 - protein, 119 aa, synthetic construct
  REGION 1..119: note = source = /note="Description of Artificial Sequence: Synthetic polypeptide"
QVQLVQSGAEVKKPGASVKVSCKASGYTFTEYTLHWVRQAPGQGLEWMGGINPNNGGTSYAQKFQGRVTMTRDTSTSTVYMELSSLRSEDTAVYYCARSGYYDYSFAYWGQGTLVTVSS

SEQ ID NO: 147 - protein, 10 aa, synthetic construct
  REGION 1..10: note = source = /note="Description of Artificial Sequence: Synthetic peptide"
GYTFTEYTLH

SEQ ID NO: 148 - protein, 10 aa, synthetic construct
  REGION 1..10: note = source = /note="Description of Artificial Sequence: Synthetic peptide"
GINPNNGGTS

SEQ ID NO: 149 - protein, 10 aa, synthetic construct
  REGION 1..10: note = source = /note="Description of Artificial Sequence: Synthetic peptide"
SGYYDYSFAY

SEQ ID NO: 150 - protein, 446 aa, synthetic construct
  REGION 1..446: note = source = /note="Description of Artificial Sequence: Synthetic polypeptide"
QVQLVQSGAEVKKPGASVKVSCKASGYTFTEYTLHWVRQAPGQGLEWMGGINPNNGGTSYAQKFQGRVTMTRDTSTSTVYMELSSLRSEDTAVYYCARSGYYDYSFAYWGQGTLVTVSSASTKGPSVFPLAPCSRSTSESTAALGCLVKDYFPEPVTVSWNSGALTSGVHTFPAVLQSSGLYSLSSVVTVPSSSLGTKTYTCNVDHKPSNTKVDKRVESKYGPPCPPCPAPEFLGGPSVFLFPPKPKDTLMISRTPEVTCVVVDVSQEDPEVQFNWYVDGVEVHNAKTKPREEQFNSTYRVVSVLTVLHQDWLNGKEYKCKVSNKGLPSSIEKTISKAKGQPREPQVYTLPPSQEEMTKNQVSLTCLVKGFYPSDIAVEWESNGQPENNYKTTPPVLDSDGSFFLYSRLTVDKSRWQEGNVFSCSVMHEALHNHYTQKSLSLSPGK

SEQ ID NO: 151 - protein, 107 aa, synthetic construct
  REGION 1..107: note = source = /note="Description of Artificial Sequence: Synthetic polypeptide"
DIQMTQSPSSLSASVGDRVTITCRASQDVKNAVVWYQQKPGKAPKLLIYSPSYRYTGVPSRFSGSGSGTDFTLTISSLQPEDFATYYCQQHYSTPFTFGQGTKLEIK

SEQ ID NO: 152 - protein, 11 aa, synthetic construct
  REGION 1..11: note = source = /note="Description of Artificial Sequence: Synthetic peptide"
RASQDVKNAVV

SEQ ID NO: 153 - protein, 7 aa, synthetic construct
  REGION 1..7: note = source = /note="Description of Artificial Sequence: Synthetic peptide"
SPSYRYT

SEQ ID NO: 154 - protein, 9 aa, synthetic construct
  REGION 1..9: note = source = /note="Description of Artificial Sequence: Synthetic peptide"
QQHYSTPFT

SEQ ID NO: 155 - protein, 214 aa, synthetic construct
  REGION 1..214: note = source = /note="Description of Artificial Sequence: Synthetic polypeptide"
DIQMTQSPSSLSASVGDRVTITCRASQDVKNAVVWYQQKPGKAPKLLIYSPSYRYTGVPSRFSGSGSGTDFTLTISSLQPEDFATYYCQQHYSTPFTFGQGTKLEIKRTVAAPSVFIFPPSDEQLKSGTASVVCLLNNFYPREAKVQWKVDNALQSGNSQESVTEQDSKDSTYSLSSTLTLSKADYEKHKVYACEVTHQGLSSPVTKSFNRGEC

SEQ ID NO: 156 - protein, 119 aa, synthetic construct
  REGION 1..119: note = source = /note="Description of Artificial Sequence: Synthetic polypeptide"
QVQLVQSGAEVKKPGASVKVSCKTSGYTFTEYTLHWVRQAPGQGLEWIGGINPNNGGTSYAQKFQGRVTMTVDTSTSTVYMELSSLRSEDTAVYYCAGSGYYDYSFAYWGQGTLVTVSS

SEQ ID NO: 157 - protein, 10 aa, synthetic construct
  REGION 1..10: note = source = /note="Description of Artificial Sequence: Synthetic peptide"
GYTFTEYTLH

SEQ ID NO: 158 - protein, 10 aa, synthetic construct
  REGION 1..10: note = source = /note="Description of Artificial Sequence: Synthetic peptide"
GINPNNGGTS

SEQ ID NO: 159 - protein, 10 aa, synthetic construct
  REGION 1..10: note = source = /note="Description of Artificial Sequence: Synthetic peptide"
SGYYDYSFAY

SEQ ID NO: 160 - protein, 446 aa, synthetic construct
  REGION 1..446: note = source = /note="Description of Artificial Sequence: Synthetic polypeptide"
QVQLVQSGAEVKKPGASVKVSCKTSGYTFTEYTLHWVRQAPGQGLEWIGGINPNNGGTSYAQKFQGRVTMTVDTSTSTVYMELSSLRSEDTAVYYCAGSGYYDYSFAYWGQGTLVTVSSASTKGPSVFPLAPCSRSTSESTAALGCLVKDYFPEPVTVSWNSGALTSGVHTFPAVLQSSGLYSLSSVVTVPSSSLGTKTYTCNVDHKPSNTKVDKRVESKYGPPCPPCPAPEFLGGPSVFLFPPKPKDTLMISRTPEVTCVVVDVSQEDPEVQFNWYVDGVEVHNAKTKPREEQFNSTYRVVSVLTVLHQDWLNGKEYKCKVSNKGLPSSIEKTISKAKGQPREPQVYTLPPSQEEMTKNQVSLTCLVKGFYPSDIAVEWESNGQPENNYKTTPPVLDSDGSFFLYSRLTVDKSRWQEGNVFSCSVMHEALHNHYTQKSLSLSPGK

SEQ ID NO: 161 - protein, 107 aa, synthetic construct; identical to SEQ ID NO: 151
  REGION 1..107: note = source = /note="Description of Artificial Sequence: Synthetic polypeptide"

SEQ ID NO: 162 - protein, 11 aa, synthetic construct
  REGION 1..11: note = source = /note="Description of Artificial Sequence: Synthetic peptide"
RASQDVKNAVV

SEQ ID NO: 163 - protein, 7 aa, synthetic construct
  REGION 1..7: note = source = /note="Description of Artificial Sequence: Synthetic peptide"
SPSYRYT

SEQ ID NO: 164 - protein, 9 aa, synthetic construct
  REGION 1..9: note = source = /note="Description of Artificial Sequence: Synthetic peptide"
QQHYSTPFT

SEQ ID NO: 165 - protein, 214 aa, synthetic construct; identical to SEQ ID NO: 155
  REGION 1..214: note = source = /note="Description of Artificial Sequence: Synthetic polypeptide"

SEQ ID NO: 166 - protein, 119 aa, synthetic construct; identical to SEQ ID NO: 156
  REGION 1..119: note = source = /note="Description of Artificial Sequence: Synthetic polypeptide"

SEQ ID NO: 167 - protein, 10 aa, synthetic construct
  REGION 1..10: note = source = /note="Description of Artificial Sequence: Synthetic peptide"
GYTFTEYTLH

SEQ ID NO: 168 - protein, 10 aa, synthetic construct
  REGION 1..10: note = source = /note="Description of Artificial Sequence: Synthetic peptide"
GINPNNGGTS

SEQ ID NO: 169 - protein, 10 aa, synthetic construct
  REGION 1..10: note = source = /note="Description of Artificial Sequence: Synthetic peptide"
SGYYDYSFAY

SEQ ID NO: 170 - protein, 446 aa, synthetic construct; identical to SEQ ID NO: 160
  REGION 1..446: note = source = /note="Description of Artificial Sequence: Synthetic polypeptide"

SEQ ID NO: 171 - protein, 107 aa, synthetic construct
  REGION 1..107: note = source = /note="Description of Artificial Sequence: Synthetic polypeptide"
DIQMTQSPSSLSASVGDRVTITCRASQDVKNAVVWYQQKPGKAPKLLIYSPSYRYTGVPSRFSGSGSGTDFTFTISSVQPEDFATYYCQQHYSTPFTFGQGTKLEIK

SEQ ID NO: 172 - protein, 11 aa, synthetic construct
  REGION 1..11: note = source = /note="Description of Artificial Sequence: Synthetic peptide"
RASQDVKNAVV

SEQ ID NO: 173 - protein, 7 aa, synthetic construct
  REGION 1..7: note = source = /note="Description of Artificial Sequence: Synthetic peptide"
SPSYRYT

SEQ ID NO: 174 - protein, 9 aa, synthetic construct
  REGION 1..9: note = source = /note="Description of Artificial Sequence: Synthetic peptide"
QQHYSTPFT

SEQ ID NO: 175 - protein, 214 aa, synthetic construct
  REGION 1..214: note = source = /note="Description of Artificial Sequence: Synthetic polypeptide"
DIQMTQSPSSLSASVGDRVTITCRASQDVKNAVVWYQQKPGKAPKLLIYSPSYRYTGVPSRFSGSGSGTDFTFTISSVQPEDFATYYCQQHYSTPFTFGQGTKLEIKRTVAAPSVFIFPPSDEQLKSGTASVVCLLNNFYPREAKVQWKVDNALQSGNSQESVTEQDSKDSTYSLSSTLTLSKADYEKHKVYACEVTHQGLSSPVTKSFNRGEC

SEQ ID NO: 176 - protein, 119 aa, synthetic construct
  REGION 1..119: note = source = /note="Description of Artificial Sequence: Synthetic polypeptide"
QVQLVQSGAEVKKPGASVKISCKTSGYTFTEYTLHWVRQAPGQGLEWIGGINPNNGGTSYAQKFQGRATLTVDTSTSTAYMELSSLRSEDTAVYYCAGSGYYDYSFAYWGQGTLVTVSS

SEQ ID NO: 177 - protein, 10 aa, synthetic construct
  REGION 1..10: note = source = /note="Description of Artificial Sequence: Synthetic peptide"
GYTFTEYTLH

SEQ ID NO: 178 - protein, 10 aa, synthetic construct
  REGION 1..10: note = source = /note="Description of Artificial Sequence: Synthetic peptide"
GINPNNGGTS

SEQ ID NO: 179 - protein, 10 aa, synthetic construct
  REGION 1..10: note = source = /note="Description of Artificial Sequence: Synthetic peptide"
SGYYDYSFAY

SEQ ID NO: 180 - protein, 446 aa, synthetic construct
  REGION 1..446: note = source = /note="Description of Artificial Sequence: Synthetic polypeptide"
QVQLVQSGAEVKKPGASVKISCKTSGYTFTEYTLHWVRQAPGQGLEWIGGINPNNGGTSYAQKFQGRATLTVDTSTSTAYMELSSLRSEDTAVYYCAGSGYYDYSFAYWGQGTLVTVSSASTKGPSVFPLAPCSRSTSESTAALGCLVKDYFPEPVTVSWNSGALTSGVHTFPAVLQSSGLYSLSSVVTVPSSSLGTKTYTCNVDHKPSNTKVDKRVESKYGPPCPPCPAPEFLGGPSVFLFPPKPKDTLMISRTPEVTCVVVDVSQEDPEVQFNWYVDGVEVHNAKTKPREEQFNSTYRVVSVLTVLHQDWLNGKEYKCKVSNKGLPSSIEKTISKAKGQPREPQVYTLPPSQEEMTKNQVSLTCLVKGFYPSDIAVEWESNGQPENNYKTTPPVLDSDGSFFLYSRLTVDKSRWQEGNVFSCSVMHEALHNHYTQKSLSLSPGK

SEQ ID NO: 181 - protein, 107 aa, synthetic construct; identical to SEQ ID NO: 151
  REGION 1..107: note = source = /note="Description of Artificial Sequence: Synthetic polypeptide"

SEQ ID NO: 182 - protein, 11 aa, synthetic construct
  REGION 1..11: note = source = /note="Description of Artificial Sequence: Synthetic peptide"
RASQDVKNAVV

SEQ ID NO: 183 - protein, 7 aa, synthetic construct
  REGION 1..7: note = source = /note="Description of Artificial Sequence: Synthetic peptide"
SPSYRYT

SEQ ID NO: 184 - protein, 9 aa, synthetic construct
  REGION 1..9: note = source = /note="Description of Artificial Sequence: Synthetic peptide"
QQHYSTPFT

SEQ ID NO: 185 - protein, 214 aa, synthetic construct; identical to SEQ ID NO: 155
  REGION 1..214: note = source = /note="Description of Artificial Sequence: Synthetic polypeptide"

SEQ ID NO: 186 - protein, 119 aa, synthetic construct; identical to SEQ ID NO: 176
  REGION 1..119: note = source = /note="Description of Artificial Sequence: Synthetic polypeptide"

SEQ ID NO: 187 - protein, 10 aa, synthetic construct
  REGION 1..10: note = source = /note="Description of Artificial Sequence: Synthetic peptide"
GYTFTEYTLH

SEQ ID NO: 188 - protein, 10 aa, synthetic construct
  REGION 1..10: note = source = /note="Description of Artificial Sequence: Synthetic peptide"
GINPNNGGTS

SEQ ID NO: 189 - protein, 10 aa, synthetic construct
  REGION 1..10: note = source = /note="Description of Artificial Sequence: Synthetic peptide"
SGYYDYSFAY

SEQ ID NO: 190 - protein, 446 aa, synthetic construct; identical to SEQ ID NO: 180
  REGION 1..446: note = source = /note="Description of Artificial Sequence: Synthetic polypeptide"

SEQ ID NO: 191 - protein, 107 aa, synthetic construct; identical to SEQ ID NO: 171
  REGION 1..107: note = source = /note="Description of Artificial Sequence: Synthetic polypeptide"

SEQ ID NO: 192 - protein, 11 aa, synthetic construct
  REGION 1..11: note = source = /note="Description of Artificial Sequence: Synthetic peptide"
RASQDVKNAVV

SEQ ID NO: 193 - protein, 7 aa, synthetic construct
  REGION 1..7: note = source = /note="Description of Artificial Sequence: Synthetic peptide"
SPSYRYT

SEQ ID NO: 194 - protein, 9 aa, synthetic construct
  REGION 1..9: note = source = /note="Description of Artificial Sequence: Synthetic peptide"
QQHYSTPFT

SEQ ID NO: 195 - protein, 214 aa, synthetic construct; identical to SEQ ID NO: 175
  REGION 1..214: note = source = /note="Description of Artificial Sequence: Synthetic polypeptide"

SEQ ID NO: 196 - protein, 119 aa, synthetic construct
  REGION 1..119: note = source = /note="Description of Artificial Sequence: Synthetic polypeptide"
QVQLVQSGAEVKKPGASVKISCKTSGYTFTEYTLHWVRQAPGQGLEWIGGINPNNGGTSYAQKFQGRATLTVDKSTSTAYMELSSLRSEDTAVYYCAGSGYYDYSFAYWGQGTLVTVSS

SEQ ID NO: 197 - protein, 10 aa, synthetic construct
  REGION 1..10: note = source = /note="Description of Artificial Sequence: Synthetic peptide"
GYTFTEYTLH

SEQ ID NO: 198 - protein, 10 aa, synthetic construct
  REGION 1..10: note = source = /note="Description of Artificial Sequence: Synthetic peptide"
GINPNNGGTS

SEQ ID NO: 199 - protein, 10 aa, synthetic construct
  REGION 1..10: note = source = /note="Description of Artificial Sequence: Synthetic peptide"
SGYYDYSFAY

SEQ ID NO: 200 - protein, 446 aa, synthetic construct
  REGION 1..446: note = source = /note="Description of Artificial Sequence: Synthetic polypeptide"
QVQLVQSGAEVKKPGASVKISCKTSGYTFTEYTLHWVRQAPGQGLEWIGGINPNNGGTSYAQKFQGRATLTVDKSTSTAYMELSSLRSEDTAVYYCAGSGYYDYSFAYWGQGTLVTVSSASTKGPSVFPLAPCSRSTSESTAALGCLVKDYFPEPVTVSWNSGALTSGVHTFPAVLQSSGLYSLSSVVTVPSSSLGTKTYTCNVDHKPSNTKVDKRVESKYGPPCPPCPAPEFLGGPSVFLFPPKPKDTLMISRTPEVTCVVVDVSQEDPEVQFNWYVDGVEVHNAKTKPREEQFNSTYRVVSVLTVLHQDWLNGKEYKCKVSNKGLPSSIEKTISKAKGQPREPQVYTLPPSQEEMTKNQVSLTCLVKGFYPSDIAVEWESNGQPENNYKTTPPVLDSDGSFFLYSRLTVDKSRWQEGNVFSCSVMHEALHNHYTQKSLSLSPGK

SEQ ID NO: 201 - protein, 107 aa, synthetic construct; identical to SEQ ID NO: 151
  REGION 1..107: note = source = /note="Description of Artificial Sequence: Synthetic polypeptide"

SEQ ID NO: 202 - protein, 11 aa, synthetic construct
  REGION 1..11: note = source = /note="Description of Artificial Sequence: Synthetic peptide"
RASQDVKNAVV

SEQ ID NO: 203 - protein, 7 aa, synthetic construct
  REGION 1..7: note = source = /note="Description of Artificial Sequence: Synthetic peptide"
SPSYRYT

SEQ ID NO: 204 - protein, 9 aa, synthetic construct
  REGION 1..9: note = source = /note="Description of Artificial Sequence: Synthetic peptide"
QQHYSTPFT

SEQ ID NO: 205 - protein, 214 aa, synthetic construct; identical to SEQ ID NO: 155
  REGION 1..214: note = source = /note="Description of Artificial Sequence: Synthetic polypeptide"

SEQ ID NO: 206 - protein, 119 aa, synthetic construct; identical to SEQ ID NO: 196
  REGION 1..119: note = source = /note="Description of Artificial Sequence: Synthetic polypeptide"

SEQ ID NO: 207 - protein, 10 aa, synthetic construct
  REGION 1..10: note = source = /note="Description of Artificial Sequence: Synthetic peptide"
GYTFTEYTLH

SEQ ID NO: 208 - protein, 10 aa, synthetic construct
  REGION 1..10: note = source = /note="Description of Artificial Sequence: Synthetic peptide"
GINPNNGGTS

SEQ ID NO: 209 - protein, 10 aa, synthetic construct
  REGION 1..10: note = source = /note="Description of Artificial Sequence: Synthetic peptide"
SGYYDYSFAY

SEQ ID NO: 210 - protein, 446 aa, synthetic construct; identical to SEQ ID NO: 200
  REGION 1..446: note = source = /note="Description of Artificial Sequence: Synthetic polypeptide"

SEQ ID NO: 211 - protein, 107 aa, synthetic construct; identical to SEQ ID NO: 171
  REGION 1..107: note = source = /note="Description of Artificial Sequence: Synthetic polypeptide"

SEQ ID NO: 212 - protein, 11 aa, synthetic construct
  REGION 1..11: note = source = /note="Description of Artificial Sequence: Synthetic peptide"
RASQDVKNAVV

SEQ ID NO: 213 - protein, 7 aa, synthetic construct
  REGION 1..7: note = source = /note="Description of Artificial Sequence: Synthetic peptide"
SPSYRYT

SEQ ID NO: 214 - protein, 9 aa, synthetic construct
  REGION 1..9: note = source = /note="Description of Artificial Sequence: Synthetic peptide"
QQHYSTPFT

SEQ ID NO: 215 - protein, 214 aa, synthetic construct; identical to SEQ ID NO: 175
  REGION 1..214: note = source = /note="Description of Artificial Sequence: Synthetic polypeptide"

SEQ ID NO: 216 - protein, 119 aa, synthetic construct
  REGION 1..119: note = source = /note="Description of Artificial Sequence: Synthetic polypeptide"
QVQLVQSGAEVKKPGASVKVSCKASGYTFTNYGMNWVRQAPGQGLEWMGWINTYTGEPTYAQKFQGRVTMTRDTSTSTVYMELSSLRSEDTAVYYCARGNGYYVGMDYWGQGTLVTVSS

SEQ ID NO: 217 - protein, 10 aa, synthetic construct
  REGION 1..10: note = source = /note="Description of Artificial Sequence: Synthetic peptide"
GYTFTNYGMN

SEQ ID NO: 218 - protein, 10 aa, synthetic construct
  REGION 1..10: note = source = /note="Description of Artificial Sequence: Synthetic peptide"
WINTYTGEPT

SEQ ID NO: 219 - protein, 10 aa, synthetic construct
  REGION 1..10: note = source = /note="Description of Artificial Sequence: Synthetic peptide"
GNGYYVGMDY

SEQ ID NO: 220 - protein, 446 aa, synthetic construct
  REGION 1..446: note = source = /note="Description of Artificial Sequence: Synthetic polypeptide"
QVQLVQSGAEVKKPGASVKVSCKASGYTFTNYGMNWVRQAPGQGLEWMGWINTYTGEPTYAQKFQGRVTMTRDTSTSTVYMELSSLRSEDTAVYYCARGNGYYVGMDYWGQGTLVTVSSASTKGPSVFPLAPCSRSTSESTAALGCLVKDYFPEPVTVSWNSGALTSGVHTFPAVLQSSGLYSLSSVVTVPSSSLGTKTYTCNVDHKPSNTKVDKRVESKYGPPCPPCPAPEFLGGPSVFLFPPKPKDTLMISRTPEVTCVVVDVSQEDPEVQFNWYVDGVEVHNAKTKPREEQFNSTYRVVSVLTVLHQDWLNGKEYKCKVSNKGLPSSIEKTISKAKGQPREPQVYTLPPSQEEMTKNQVSLTCLVKGFYPSDIAVEWESNGQPENNYKTTPPVLDSDGSFFLYSRLTVDKSRWQEGNVFSCSVMHEALHNHYTQKSLSLSPGK

SEQ ID NO: 221 - protein, 109 aa, synthetic construct
  REGION 1..109: note = source = /note="Description of Artificial Sequence: Synthetic polypeptide"
QAVVTQEPSLTVSPGGTVTLTCRSSTGAVTTSNHANWFQQKPGQAPRTLIYGTNGRGSWTPARFSGSLLGGKAALTLSGAQPEDEAEYYCALWFSNHWVFGGGTKLTVL

SEQ ID NO: 222 - protein, 14 aa, synthetic construct
  REGION 1..14: note = source = /note="Description of Artificial Sequence: Synthetic peptide"
RSSTGAVTTSNHAN

SEQ ID NO: 223 - protein, 7 aa, synthetic construct
  REGION 1..7: note = source = /note="Description of Artificial Sequence: Synthetic peptide"
GTNGRGS

SEQ ID NO: 224 - protein, 9 aa, synthetic construct
  REGION 1..9: note = source = /note="Description of Artificial Sequence: Synthetic peptide"
ALWFSNHWV

SEQ ID NO: 225 - protein, 214 aa, synthetic construct
  REGION 1..214: note = source = /note="Description of Artificial Sequence: Synthetic polypeptide"
QAVVTQEPSLTVSPGGTVTLTCRSSTGAVTTSNHANWFQQKPGQAPRTLIYGTNGRGSWTPARFSGSLLGGKAALTLSGAQPEDEAEYYCALWFSNHWVFGGGTKLTVLQPKAAPSVTLFPPSSEELQANKATLVCLISDFYPGAVTVAWKADSSPVKAGVETTTPSKQSNNKYAASSYLSLTPEQWKSHRSYSCQVTHEGSTVEKTVAPTECS

SEQ ID NO: 226 - protein, 119 aa, synthetic construct
  REGION 1..119: note = source = /note="Description of Artificial Sequence: Synthetic polypeptide"
QVQLVQSGAEVKKPGASVKVSCKASGYTFTNYGMNWVRQAPGQGLEWMGWINTYTGEPTYAQKFQGRVTMTLDTSTSTAYMELSSLRSEDTAVYYCSRGNGYYVGMDYWGQGTLVTVSS

SEQ ID NO: 227 - protein, 10 aa, synthetic construct
  REGION 1..10: note = source = /note="Description of Artificial Sequence: Synthetic peptide"
GYTFTNYGMN

SEQ ID NO: 228 - protein, 10 aa, synthetic construct
  REGION 1..10: note = source = /note="Description of Artificial Sequence: Synthetic peptide"
WINTYTGEPT

SEQ ID NO: 229 - protein, 10 aa, synthetic construct
  REGION 1..10: note = source = /note="Description of Artificial Sequence: Synthetic peptide"
GNGYYVGMDY

SEQ ID NO: 230 - protein, 446 aa, synthetic construct
  REGION 1..446: note = source = /note="Description of Artificial Sequence: Synthetic polypeptide"
QVQLVQSGAEVKKPGASVKVSCKASGYTFTNYGMNWVRQAPGQGLEWMGWINTYTGEPTYAQKFQGRVTMTLDTSTSTAYMELSSLRSEDTAVYYCSRGNGYYVGMDYWGQGTLVTVSSASTKGPSVFPLAPCSRSTSESTAALGCLVKDYFPEPVTVSWNSGALTSGVHTFPAVLQSSGLYSLSSVVTVPSSSLGTKTYTCNVDHKPSNTKVDKRVESKYGPPCPPCPAPEFLGGPSVFLFPPKPKDTLMISRTPEVTCVVVDVSQEDPEVQFNWYVDGVEVHNAKTKPREEQFNSTYRVVSVLTVLHQDWLNGKEYKCKVSNKGLPSSIEKTISKAKGQPREPQVYTLPPSQEEMTKNQVSLTCLVKGFYPSDIAVEWESNGQPENNYKTTPPVLDSDGSFFLYSRLTVDKSRWQEGNVFSCSVMHEALHNHYTQKSLSLSPGK

SEQ ID NO: 231 - protein, 109 aa, synthetic construct
  REGION 1..109: note = source = /note="Description of Artificial Sequence: Synthetic polypeptide"
QAVVTQEPSLTVSPGGTVTLTCGSSTGAVTTSNHANWVQQKPGQAFRGLIRGTNGRGSWTPARFSGSLLGGKAALTISGAQPEDEAEYYCALWFSNHWVFGGGTKLTVL

SEQ ID NO: 232 - protein, 14 aa, synthetic construct
  REGION 1..14: note = source = /note="Description of Artificial Sequence: Synthetic peptide"
GSSTGAVTTSNHAN

SEQ ID NO: 233 - protein, 7 aa, synthetic construct
  REGION 1..7: note = source = /note="Description of Artificial Sequence: Synthetic peptide"
GTNGRGS

SEQ ID NO: 234 - protein, 9 aa, synthetic construct
  REGION 1..9: note = source = /note="Description of Artificial Sequence: Synthetic peptide"
ALWFSNHWV

SEQ ID NO: 235 - protein, 214 aa, synthetic construct
  REGION 1..214: note = source = /note="Description of Artificial Sequence: Synthetic polypeptide"
QAVVTQEPSLTVSPGGTVTLTCGSSTGAVTTSNHANWVQQKPGQAFRGLIRGTNGRGSWTPARFSGSLLGGKAALTISGAQPEDEAEYYCALWFSNHWVFGGGTKLTVLQPKAAPSVTLFPPSSEELQANKATLVCLISDFYPGAVTVAWKADSSPVKAGVETTTPSKQSNNKYAASSYLSLTPEQWKSHRSYSCQVTHEGSTVEKTVAPTECS

SEQ ID NO: 236 - protein, 119 aa, synthetic construct; identical to SEQ ID NO: 226
  REGION 1..119: note = source = /note="Description of Artificial Sequence: Synthetic polypeptide"

SEQ ID NO: 237 - protein, 10 aa, synthetic construct
  REGION 1..10: note = source = /note="Description of Artificial Sequence: Synthetic peptide"
GYTFTNYGMN

SEQ ID NO: 238 - protein, 10 aa, synthetic construct
  REGION 1..10: note = source = /note="Description of Artificial Sequence: Synthetic peptide"
WINTYTGEPT

SEQ ID NO: 239 - protein, 10 aa, synthetic construct
  REGION 1..10: note = source = /note="Description of Artificial Sequence: Synthetic peptide"
GNGYYVGMDY

SEQ ID NO: 240 - protein, 446 aa, synthetic construct; identical to SEQ ID NO: 230
  REGION 1..446: note = source = /note="Description of Artificial Sequence: Synthetic polypeptide"

SEQ ID NO: 241 - protein, 109 aa, synthetic construct
  REGION 1..109: note = source = /note="Description of Artificial Sequence: Synthetic polypeptide"
QAVVTQEPSLTVSPGGTVTLTCGSSTGAVTTSNHANWVQQKPGQAFRGLIRGTNGRGSGVPARFSGSLLGGKAALTISGAQPEDEAEYYCALWFSNHWVFGGGTKLTVL

SEQ ID NO: 242 - protein, 14 aa, synthetic construct
  REGION 1..14: note = source = /note="Description of Artificial Sequence: Synthetic peptide"
GSSTGAVTTSNHAN

SEQ ID NO: 243 - protein, 7 aa, synthetic construct
  REGION 1..7: note = source = /note="Description of Artificial Sequence: Synthetic peptide"
GTNGRGS

SEQ ID NO: 244 - protein, 9 aa, synthetic construct
  REGION 1..9: note = source = /note="Description of Artificial Sequence: Synthetic peptide"
ALWFSNHWV

SEQ ID NO: 245 - protein, 214 aa, synthetic construct
  REGION 1..214: note = source = /note="Description of Artificial Sequence: Synthetic polypeptide"
QAVVTQEPSLTVSPGGTVTLTCGSSTGAVTTSNHANWVQQKPGQAFRGLIRGTNGRGSGVPARFSGSLLGGKAALTISGAQPEDEAEYYCALWFSNHWVFGGGTKLTVLQPKAAPSVTLFPPSSEELQANKATLVCLISDFYPGAVTVAWKADSSPVKAGVETTTPSKQSNNKYAASSYLSLTPEQWKSHRSYSCQVTHEGSTVEKTVAPTECS

SEQ ID NO: 246 - protein, 119 aa, synthetic construct
  REGION 1..119: note = source = /note="Description of Artificial Sequence: Synthetic polypeptide"
QVQLVQSGAEVKKPGASVKISCKASGYTFTNYGMNWVRQAPGQGLEWMGWINTYTGEPTYAQKFQGRFTFTLDTSTSTAYLEISSLRSEDTAVYYCSRGNGYYVGMDYWGQGTLVTVSS

SEQ ID NO: 247 - protein, 10 aa, synthetic construct
  REGION 1..10: note = source = /note="Description of Artificial Sequence: Synthetic peptide"
GYTFTNYGMN

SEQ ID NO: 248 - protein, 10 aa, synthetic construct
  REGION 1..10: note = source = /note="Description of Artificial Sequence: Synthetic peptide"
WINTYTGEPT

SEQ ID NO: 249 - protein, 10 aa, synthetic construct
  REGION 1..10: note = source = /note="Description of Artificial Sequence: Synthetic peptide"
GNGYYVGMDY

SEQ ID NO: 250 - protein, 446 aa, synthetic construct
  REGION 1..446: note = source = /note="Description of Artificial Sequence: Synthetic polypeptide"
QVQLVQSGAEVKKPGASVKISCKASGYTFTNYGMNWVRQAPGQGLEWMGWINTYTGEPTYAQKFQGRFTFTLDTSTSTAYLEISSLRSEDTAVYYCSRGNGYYVGMDYWGQGTLVTVSSASTKGPSVFPLAPCSRSTSESTAALGCLVKDYFPEPVTVSWNSGALTSGVHTFPAVLQSSGLYSLSSVVTVPSSSLGTKTYTCNVDHKPSNTKVDKRVESKYGPPCPPCPAPEFLGGPSVFLFPPKPKDTLMISRTPEVTCVVVDVSQEDPEVQFNWYVDGVEVHNAKTKPREEQFNSTYRVVSVLTVLHQDWLNGKEYKCKVSNKGLPSSIEKTISKAKGQPREPQVYTLPPSQEEMTKNQVSLTCLVKGFYPSDIAVEWESNGQPENNYKTTPPVLDSDGSFFLYSRLTVDKSRWQEGNVFSCSVMHEALHNHYTQKSLSLSPGK

SEQ ID NO: 251 - protein, 109 aa, synthetic construct; identical to SEQ ID NO: 231
  REGION 1..109: note = source = /note="Description of Artificial Sequence: Synthetic polypeptide"

SEQ ID NO: 252 - protein, 14 aa, synthetic construct
  REGION 1..14: note = source = /note="Description of Artificial Sequence: Synthetic peptide"
GSSTGAVTTSNHAN

SEQ ID NO: 253 - protein, 7 aa, synthetic construct
  REGION 1..7: note = source = /note="Description of Artificial Sequence: Synthetic peptide"
GTNGRGS

SEQ ID NO: 254 - protein, 9 aa, synthetic construct
  REGION 1..9: note = source = /note="Description of Artificial Sequence: Synthetic peptide"
ALWFSNHWV

SEQ ID NO: 255 - protein, 214 aa, synthetic construct; identical to SEQ ID NO: 235
  REGION 1..214: note = source = /note="Description of Artificial Sequence: Synthetic polypeptide"

SEQ ID NO: 256 - protein, 119 aa, synthetic construct; identical to SEQ ID NO: 246
  REGION 1..119: note = source = /note="Description of Artificial Sequence: Synthetic polypeptide"

SEQ ID NO: 257 - protein, 10 aa, synthetic construct
  REGION 1..10: note = source = /note="Description of Artificial Sequence: Synthetic peptide"
GYTFTNYGMN

SEQ ID NO: 258 - protein, 10 aa, synthetic construct
  REGION 1..10: note = source = /note="Description of Artificial Sequence: Synthetic peptide"
WINTYTGEPT

SEQ ID NO: 259 - protein, 10 aa, synthetic construct
  REGION 1..10: note = source = /note="Description of Artificial Sequence: Synthetic peptide"
GNGYYVGMDY

SEQ ID NO: 260 - protein, 446 aa, synthetic construct; identical to SEQ ID NO: 250
  REGION 1..446: note = source = /note="Description of Artificial Sequence: Synthetic polypeptide"

SEQ ID NO: 261 - protein, 109 aa, synthetic construct; identical to SEQ ID NO: 241
  REGION 1..109: note = source = /note="Description of Artificial Sequence: Synthetic polypeptide"

SEQ ID NO: 262 - protein, 14 aa, synthetic construct
  REGION 1..14: note = source = /note="Description of Artificial Sequence: Synthetic peptide"
GSSTGAVTTSNHAN

SEQ ID NO: 263 - protein, 7 aa, synthetic construct
  REGION 1..7: note = source = /note="Description of Artificial Sequence: Synthetic peptide"
GTNGRGS

SEQ ID NO: 264 - protein, 9 aa, synthetic construct
  REGION 1..9: note = source = /note="Description of Artificial Sequence: Synthetic peptide"
ALWFSNHWV

SEQ ID NO: 265 - protein, 214 aa, synthetic construct; identical to SEQ ID NO: 245
  REGION 1..214: note = source = /note="Description of Artificial Sequence: Synthetic polypeptide"

SEQ ID NO: 266 - protein, 119 aa, synthetic construct
  REGION 1..119: note = source = /note="Description of Artificial Sequence: Synthetic polypeptide"
QVQLVQSGAEVKKPGASVKISCKASGYTFTNYGMNWVRQAPGQGLEWMGWINTYTGEPTYAQKFQGRFTFTLDASTSTAYLEISSLRSEDTAVYYCSRGNGYYVGMDYWGQGTLVTVSS

SEQ ID NO: 267 - protein, 10 aa, synthetic construct
  REGION 1..10: note = source = /note="Description of Artificial Sequence: Synthetic peptide"
GYTFTNYGMN

SEQ ID NO: 268 - protein, 10 aa, synthetic construct
  REGION 1..10: note = source = /note="Description of Artificial Sequence: Synthetic peptide"
WINTYTGEPT

SEQ ID NO: 269 - protein, 10 aa, synthetic construct
  REGION 1..10: note = source = /note="Description of Artificial Sequence: Synthetic peptide"
GNGYYVGMDY

SEQ ID NO: 270 - protein, 446 aa, synthetic construct; identical to SEQ ID NO: 250
  REGION 1..446: note = source = /note="Description of Artificial Sequence: Synthetic polypeptide"

SEQ ID NO: 271 - protein, 109 aa, synthetic construct; identical to SEQ ID NO: 231
  REGION 1..109: note = source = /note="Description of Artificial Sequence: Synthetic polypeptide"

SEQ ID NO: 272 - protein, 14 aa, synthetic construct
  REGION 1..14: note = source = /note="Description of Artificial Sequence: Synthetic peptide"
GSSTGAVTTSNHAN

SEQ ID NO: 273 - protein, 7 aa, synthetic construct
  REGION 1..7: note = source = /note="Description of Artificial Sequence: Synthetic peptide"
GTNGRGS

SEQ ID NO: 274 - protein, 9 aa, synthetic construct
  REGION 1..9: note = source = /note="Description of Artificial Sequence: Synthetic peptide"
ALWFSNHWV

SEQ ID NO: 275 - protein, 214 aa, synthetic construct; identical to SEQ ID NO: 235
  REGION 1..214: note = source = /note="Description of Artificial Sequence: Synthetic polypeptide"

SEQ ID NO: 276 - protein, 119 aa, synthetic construct; identical to SEQ ID NO: 266
  REGION 1..119: note = source = /note="Description of Artificial Sequence: Synthetic polypeptide"

SEQ ID NO: 277 - protein, 10 aa, synthetic construct
  REGION 1..10: note = source = /note="Description of Artificial Sequence: Synthetic peptide"
GYTFTNYGMN

SEQ ID NO: 278 - protein, 10 aa, synthetic construct
  REGION 1..10: note = source = /note="Description of Artificial Sequence: Synthetic peptide"
WINTYTGEPT

SEQ ID NO: 279 - protein, 10 aa, synthetic construct
  REGION 1..10: note = source = /note="Description of Artificial Sequence: Synthetic peptide"
GNGYYVGMDY

SEQ ID NO: 280 - protein, 446 aa, synthetic construct
  REGION 1..446: note = source = /note="Description of Artificial Sequence: Synthetic polypeptide"
QVQLVQSGAEVKKPGASVKISCKASGYTFTNYGMNWVRQAPGQGLEWMGWINTYTGEPTYAQKFQGRFTFTLDASTSTAYLEISSLRSEDTAVYYCSRGNGYYVGMDYWGQGTLVTVSSASTKGPSVFPLAPCSRSTSESTAALGCLVKDYFPEPVTVSWNSGALTSGVHTFPAVLQSSGLYSLSSVVTVPSSSLGTKTYTCNVDHKPSNTKVDKRVESKYGPPCPPCPAPEFLGGPSVFLFPPKPKDTLMISRTPEVTCVVVDVSQEDPEVQFNWYVDGVEVHNAKTKPREEQFNSTYRVVSVLTVLHQDWLNGKEYKCKVSNKGLPSSIEKTISKAKGQPREPQVYTLPPSQEEMTKNQVSLTCLVKGFYPSDIAVEWESNGQPENNYKTTPPVLDSDGSFFLYSRLTVDKSRWQEGNVFSCSVMHEALHNHYTQKSLSLSPGK

SEQ ID NO: 281 - protein, 109 aa, synthetic construct; identical to SEQ ID NO: 241
  REGION 1..109: note = source = /note="Description of Artificial Sequence: Synthetic polypeptide"

SEQ ID NO: 282 - protein, 14 aa, synthetic construct
  REGION 1..14: note = source = /note="Description of Artificial Sequence: Synthetic peptide"
GSSTGAVTTSNHAN

SEQ ID NO: 283 - protein, 7 aa, synthetic construct
  REGION 1..7: note = source = /note="Description of Artificial Sequence: Synthetic peptide"
GTNGRGS

SEQ ID NO: 284 - protein, 9 aa, synthetic construct
  REGION 1..9: note = source = /note="Description of Artificial Sequence: Synthetic peptide"
ALWFSNHWV

SEQ ID NO: 285 - protein, 214 aa, synthetic construct; identical to SEQ ID NO: 245
  REGION 1..214: note = source = /note="Description of Artificial Sequence: Synthetic polypeptide"

SEQ ID NO: 286 - protein, 119 aa, synthetic construct
  REGION 1..119: note = source = /note="Description of Artificial Sequence: Synthetic polypeptide"
EVQLVESGGGLVQPGGSLRLSCAASGFTFSSYIMSWVRQAPGKGLEWVSTISGGGTNTYYADSVKGRFTISRDNSKNTLYLQMNSLRAEDTAVYYCARWLLSYYAMDYWGQGTLVTVSS

SEQ ID NO: 287 - protein, 10 aa, synthetic construct
  REGION 1..10: note = source = /note="Description of Artificial Sequence: Synthetic peptide"
GFTFSSYIMS

SEQ ID NO: 288 - protein, 10 aa, synthetic construct
  REGION 1..10: note = source = /note="Description of Artificial Sequence: Synthetic peptide"
TISGGGTNTY

SEQ ID NO: 289 - protein, 10 aa, synthetic construct
  REGION 1..10: note = source = /note="Description of Artificial Sequence: Synthetic peptide"
WLLSYYAMDY

SEQ ID NO: 290 - protein, 446 aa, synthetic construct
  REGION 1..446: note = source = /note="Description of Artificial Sequence: Synthetic polypeptide"
EVQLVESGGGLVQPGGSLRLSCAASGFTFSSYIMSWVRQAPGKGLEWVSTISGGGTNTYYADSVKGRFTISRDNSKNTLYLQMNSLRAEDTAVYYCARWLLSYYAMDYWGQGTLVTVSSASTKGPSVFPLAPCSRSTSESTAALGCLVKDYFPEPVTVSWNSGALTSGVHTFPAVLQSSGLYSLSSVVTVPSSSLGTKTYTCNVDHKPSNTKVDKRVESKYGPPCPPCPAPEFLGGPSVFLFPPKPKDTLMISRTPEVTCVVVDVSQEDPEVQFNWYVDGVEVHNAKTKPREEQFNSTYRVVSVLTVLHQDWLNGKEYKCKVSNKGLPSSIEKTISKAKGQPREPQVYTLPPSQEEMTKNQVSLTCLVKGFYPSDIAVEWESNGQPENNYKTTPPVLDSDGSFFLYSRLTVDKSRWQEGNVFSCSVMHEALHNHYTQKSLSLSPGK

SEQ ID NO: 291 - protein, 107 aa, synthetic construct
  REGION 1..107: note = source = /note="Description of Artificial Sequence: Synthetic polypeptide"
DIQMTQSPSSLSASVGDRVTITCRASQNINVWLTWYQQKPGKAPKLLIYKASNLHTGVPSRFSGSGSGTDFTLTISSLQPEDFATYYCQQGQSYPYTFGQGTKLEIK

SEQ ID NO: 292 - protein, 11 aa, synthetic construct
  REGION 1..11: note = source = /note="Description of Artificial Sequence: Synthetic peptide"
RASQNINVWLT

SEQ ID NO: 293 - protein, 7 aa, synthetic construct
  REGION 1..7: note = source = /note="Description of Artificial Sequence: Synthetic peptide"
KASNLHT

SEQ ID NO: 294 - protein, 9 aa, synthetic construct
  REGION 1..9: note = source = /note="Description of Artificial Sequence: Synthetic peptide"
QQGQSYPYT

SEQ ID NO: 295 - protein, 214 aa, synthetic construct
  REGION 1..214: note = source = /note="Description of Artificial Sequence: Synthetic polypeptide"
DIQMTQSPSSLSASVGDRVTITCRASQNINVWLTWYQQKPGKAPKLLIYKASNLHTGVPSRFSGSGSGTDFTLTISSLQPEDFATYYCQQGQSYPYTFGQGTKLEIKRTVAAPSVFIFPPSDEQLKSGTASVVCLLNNFYPREAKVQWKVDNALQSGNSQESVTEQDSKDSTYSLSSTLTLSKADYEKHKVYACEVTHQGLSSPVTKSFNRGEC

SEQ ID NO: 296 - protein, 119 aa, synthetic construct
  REGION 1..119: note = source = /note="Description of Artificial Sequence: Synthetic polypeptide"
EVQLVESGGGLVQPGGSLRLSCAASGFTFSSYIMSWVRQAPGKGLEWVSTISGGGTNTYYADSVKGRFTISRDNSKNTLYLQMNSLRAEDTAVYYCAKWLLSYYAMDYWGQGTLVTVSS

SEQ ID NO: 297 - protein, 10 aa, synthetic construct
  REGION 1..10: note = source = /note="Description of Artificial Sequence: Synthetic peptide"
GFTFSSYIMS

SEQ ID NO: 298 - protein, 10 aa, synthetic construct
  REGION 1..10: note = source = /note="Description of Artificial Sequence: Synthetic peptide"
TISGGGTNTY

SEQ ID NO: 299 - protein, 10 aa, synthetic construct
  REGION 1..10: note = source = /note="Description of Artificial Sequence: Synthetic peptide"
WLLSYYAMDY

SEQ ID NO: 300 - protein, 446 aa, synthetic construct
  REGION 1..446: note = source = /note="Description of Artificial Sequence: Synthetic polypeptide"
EVQLVESGGGLVQPGGSLRLSCAASGFTFSSYIMSWVRQAPGKGLEWVSTISGGGTNTYYADSVKGRFTISRDNSKNTLYLQMNSLRAEDTAVYYCAKWLLSYYAMDYWGQGTLVTVSSASTKGPSVFPLAPCSRSTSESTAALGCLVKDYFPEPVTVSWNSGALTSGVHTFPAVLQSSGLYSLSSVVTVPSSSLGTKTYTCNVDHKPSNTKVDKRVESKYGPPCPPCPAPEFLGGPSVFLFPPKPKDTLMISRTPEVTCVVVDVSQEDPEVQFNWYVDGVEVHNAKTKPREEQFNSTYRVVSVLTVLHQDWLNGKEYKCKVSNKGLPSSIEKTISKAKGQPREPQVYTLPPSQEEMTKNQVSLTCLVKGFYPSDIAVEWESNGQPENNYKTTPPVLDSDGSFFLYSRLTVDKSRWQEGNVFSCSVMHEALHNHYTQKSLSLSPGK

SEQ ID NO: 301 - protein, 107 aa, synthetic construct; identical to SEQ ID NO: 291
  REGION 1..107: note = source = /note="Description of Artificial Sequence: Synthetic polypeptide"

SEQ ID NO: 302 - protein, 11 aa, synthetic construct
  REGION 1..11: note = source = /note="Description of Artificial Sequence: Synthetic peptide"
RASQNINVWLT

SEQ ID NO: 303 - protein, 7 aa, synthetic construct
  REGION 1..7: note = source = /note="Description of Artificial Sequence: Synthetic peptide"
KASNLHT

SEQ ID NO: 304 - protein, 9 aa, synthetic construct
  REGION 1..9: note = source = /note="Description of Artificial Sequence: Synthetic peptide"
QQGQSYPYT

SEQ ID NO: 305 - protein, 214 aa, synthetic construct; identical to SEQ ID NO: 295
  REGION 1..214: note = source = /note="Description of Artificial Sequence: Synthetic polypeptide"

SEQ ID NO: 306 - protein, 119 aa, synthetic construct
  REGION 1..119: note = source = /note="Description of Artificial Sequence: Synthetic polypeptide"
EVQLVESGGGLVQPGGSLRLSCAASGFTFSSYIMSWVRQAPGKGLEWVATISGGGTNTYYADSVKGRFTISRDNSKNTLYLQMNSLRAEDTAVYYCAKWLLSYYAMDYWGQGTLVTVSS

SEQ ID NO: 307 - protein, 10 aa, synthetic construct
  REGION 1..10: note = source = /note="Description of Artificial Sequence: Synthetic peptide"
GFTFSSYIMS

SEQ ID NO: 308 - protein, 10 aa, synthetic construct
  REGION 1..10: note = source = /note="Description of Artificial Sequence: Synthetic peptide"
TISGGGTNTY

SEQ ID NO: 309 - protein, 10 aa, synthetic construct
  REGION 1..10: note = source = /note="Description of Artificial Sequence: Synthetic peptide"
WLLSYYAMDY

SEQ ID NO: 310 - protein, 446 aa, synthetic construct
  REGION 1..446: note = source = /note="Description of Artificial Sequence: Synthetic polypeptide"
EVQLVESGGGLVQPGGSLRLSCAASGFTFSSYIMSWVRQAPGKGLEWVATISGGGTNTYYADSVKGRFTISRDNSKNTLYLQMNSLRAEDTAVYYCAKWLLSYYAMDYWGQGTLVTVSSASTKGPSVFPLAPCSRSTSESTAALGCLVKDYFPEPVTVSWNSGALTSGVHTFPAVLQSSGLYSLSSVVTVPSSSLGTKTYTCNVDHKPSNTKVDKRVESKYGPPCPPCPAPEFLGGPSVFLFPPKPKDTLMISRTPEVTCVVVDVSQEDPEVQFNWYVDGVEVHNAKTKPREEQFNSTYRVVSVLTVLHQDWLNGKEYKCKVSNKGLPSSIEKTISKAKGQPREPQVYTLPPSQEEMTKNQVSLTCLVKGFYPSDIAVEWESNGQPENNYKTTPPVLDSDGSFFLYSRLTVDKSRWQEGNVFSCSVMHEALHNHYTQKSLSLSPGK

SEQ ID NO: 311 - protein, 107 aa, synthetic construct; identical to SEQ ID NO: 291
  REGION 1..107: note = source = /note="Description of Artificial Sequence: Synthetic polypeptide"

SEQ ID NO: 312 - protein, 11 aa, synthetic construct
  REGION 1..11: note = source = /note="Description of Artificial Sequence: Synthetic peptide"
RASQNINVWLT

SEQ ID NO: 313 - protein, 7 aa, synthetic construct
  REGION 1..7: note = source = /note="Description of Artificial Sequence: Synthetic peptide"
KASNLHT

SEQ ID NO: 314 - protein, 9 aa, synthetic construct
  REGION 1..9: note = source = /note="Description of Artificial Sequence: Synthetic peptide"
QQGQSYPYT

SEQ ID NO: 315 - protein, 214 aa, synthetic construct; identical to SEQ ID NO: 295
  REGION 1..214: note = source = /note="Description of Artificial Sequence: Synthetic polypeptide"

SEQ ID NO: 316 - protein, 119 aa, synthetic construct; identical to SEQ ID NO: 296
  REGION 1..119: note = source = /note="Description of Artificial Sequence: Synthetic polypeptide"

SEQ ID NO: 317 - protein, 10 aa, synthetic construct
  REGION 1..10: note = source = /note="Description of Artificial Sequence: Synthetic peptide"
GFTFSSYIMS

SEQ ID NO: 318 - protein, 10 aa, synthetic construct
  REGION 1..10: note = source = /note="Description of Artificial Sequence: Synthetic peptide"
TISGGGTNTY

SEQ ID NO: 319 - protein, 10 aa, synthetic construct
  REGION 1..10: note = source = /note="Description of Artificial Sequence: Synthetic peptide"
WLLSYYAMDY

SEQ ID NO: 320 - protein, 446 aa, synthetic construct; identical to SEQ ID NO: 300
  REGION 1..446: note = source = /note="Description of Artificial Sequence: Synthetic polypeptide"

SEQ ID NO: 321 - protein, 107 aa, synthetic construct
  REGION 1..107: note = source = /note="Description of Artificial Sequence: Synthetic polypeptide"
DIQMTQSPSSLSASVGDRITITCRASQNINVWLTWYQQKPGKAPKLLIYKASNLHTGVPSRFSGSGSGTDFTLTISSLQPEDFATYYCQQGQSYPYTFGQGTKLEIK

SEQ ID NO: 322 - protein, 11 aa, synthetic construct
  REGION 1..11: note = source = /note="Description of Artificial Sequence: Synthetic peptide"
RASQNINVWLT

SEQ ID NO: 323 - protein, 7 aa, synthetic construct
  REGION 1..7: note = source = /note="Description of Artificial Sequence: Synthetic peptide"
KASNLHT

SEQ ID NO: 324 - protein, 9 aa, synthetic construct
  REGION 1..9: note = source = /note="Description of Artificial Sequence: Synthetic peptide"
QQGQSYPYT

SEQ ID NO: 325 - protein, 214 aa, synthetic construct
  REGION 1..214: note = source = /note="Description of Artificial Sequence: Synthetic polypeptide"
DIQMTQSPSSLSASVGDRITITCRASQNINVWLTWYQQKPGKAPKLLIYKASNLHTGVPSRFSGSGSGTDFTLTISSLQPEDFATYYCQQGQSYPYTFGQGTKLEIKRTVAAPSVFIFPPSDEQLKSGTASVVCLLNNFYPREAKVQWKVDNALQSGNSQESVTEQDSKDSTYSLSSTLTLSKADYEKHKVYACEVTHQGLSSPVTKSFNRGEC

SEQ ID NO: 326 - protein, 119 aa, synthetic construct; identical to SEQ ID NO: 306
  REGION 1..119: note = source = /note="Description of Artificial Sequence: Synthetic polypeptide"

SEQ ID NO: 327 - protein, 10 aa, synthetic construct
  REGION 1..10: note = source = /note="Description of Artificial Sequence: Synthetic peptide"
GFTFSSYIMS

SEQ ID NO: 328 - protein, 10 aa, synthetic construct
  REGION 1..10: note = source = /note="Description of Artificial Sequence: Synthetic peptide"
TISGGGTNTY

SEQ ID NO: 329 - protein, 10 aa, synthetic construct
  REGION 1..10: note = source = /note="Description of Artificial Sequence: Synthetic peptide"
WLLSYYAMDY

SEQ ID NO: 330 - protein, 446 aa, synthetic construct; identical to SEQ ID NO: 310
  REGION 1..446: note = source = /note="Description of Artificial Sequence: Synthetic polypeptide"

SEQ ID NO: 331 - protein, 107 aa, synthetic construct; identical to SEQ ID NO: 321
  REGION 1..107: note = source = /note="Description of Artificial Sequence: Synthetic polypeptide"

SEQ ID NO: 332 - protein, 11 aa, synthetic construct
  REGION 1..11: note = source = /note="Description of Artificial Sequence: Synthetic peptide"
RASQNINVWLT

SEQ ID NO: 333 - protein, 7 aa, synthetic construct
  REGION 1..7: note = source = /note="Description of Artificial Sequence: Synthetic peptide"
KASNLHT

SEQ ID NO: 334 - protein, 9 aa, synthetic construct
  REGION 1..9: note = source = /note="Description of Artificial Sequence: Synthetic peptide"
QQGQSYPYT

SEQ ID NO: 335 - protein, 214 aa, synthetic construct; identical to SEQ ID NO: 325
  REGION 1..214: note = source = /note="Description of Artificial Sequence: Synthetic polypeptide"

SEQ ID NO: 336 - protein, 119 aa, synthetic construct; identical to SEQ ID NO: 296
  REGION 1..119: note = source = /note="Description of Artificial Sequence: Synthetic polypeptide"

SEQ ID NO: 337 - protein, 10 aa, synthetic construct
  REGION 1..10: note = source = /note="Description of Artificial Sequence: Synthetic peptide"
GFTFSSYIMS

SEQ ID NO: 338 - protein, 10 aa, synthetic construct
  REGION 1..10: note = source = /note="Description of Artificial Sequence: Synthetic peptide"
TISGGGTNTY

SEQ ID NO: 339 - protein, 10 aa, synthetic construct
  REGION 1..10: note = source = /note="Description of Artificial Sequence: Synthetic peptide"
WLLSYYAMDY

SEQ ID NO: 340 - protein, 446 aa, synthetic construct; identical to SEQ ID NO: 300
  REGION 1..446: note = source = /note="Description of Artificial Sequence: Synthetic polypeptide"

SEQ ID NO: 341 - protein, 107 aa, synthetic construct
  REGION 1..107: note = source = /note="Description of Artificial Sequence: Synthetic polypeptide"
DIQMTQSPSSLSASVGDRVTITCRASQNINVWLTWYQQKPGKAPKLLIYKASKSHTGVPSRFSGSGSGTDFTLTISSLQPEDFATYYCQQGQSYPYTFGQGTKLEIK

SEQ ID NO: 342 - protein, 11 aa, synthetic construct
  REGION 1..11: note = source = /note="Description of Artificial Sequence: Synthetic peptide"
RASQNINVWLT

SEQ ID NO: 343 - protein, 7 aa, synthetic construct
  REGION 1..7: note = source = /note="Description of Artificial Sequence: Synthetic peptide"
KASKSHT

SEQ ID NO: 344 - protein, 9 aa, synthetic construct
  REGION 1..9: note = source = /note="Description of Artificial Sequence: Synthetic peptide"
QQGQSYPYT

SEQ ID NO: 345 - protein, 214 aa, synthetic construct
  REGION 1..214: note = source = /note="Description of Artificial Sequence: Synthetic polypeptide"
DIQMTQSPSSLSASVGDRVTITCRASQNINVWLTWYQQKPGKAPKLLIYKASKSHTGVPSRFSGSGSGTDFTLTISSLQPEDFATYYCQQGQSYPYTFGQGTKLEIKRTVAAPSVFIFPPSDEQLKSGTASVVCLLNNFYPREAKVQWKVDNALQSGNSQESVTEQDSKDSTYSLSSTLTLSKADYEKHKVYACEVTHQGLSSPVTKSFNRGEC

SEQ ID NO: 346 - protein, 119 aa, synthetic construct; identical to SEQ ID NO: 306
  REGION 1..119: note = source = /note="Description of Artificial Sequence: Synthetic polypeptide"

SEQ ID NO: 347 - protein, 10 aa, synthetic construct
  REGION 1..10: note = source = /note="Description of Artificial Sequence: Synthetic peptide"
GFTFSSYIMS

SEQ ID NO: 348 - protein, 10 aa, synthetic construct
  REGION 1..10: note = source = /note="Description of Artificial Sequence: Synthetic peptide"
TISGGGTNTY

SEQ ID NO: 349 - protein, 10 aa, synthetic construct
  REGION 1..10: note = source = /note="Description of Artificial Sequence: Synthetic peptide"
WLLSYYAMDY

SEQ ID NO: 350 - protein, 446 aa, synthetic construct; identical to SEQ ID NO: 310
  REGION 1..446: note = source = /note="Description of Artificial Sequence: Synthetic polypeptide"

SEQ ID NO: 351 - protein, 107 aa, synthetic construct; identical to SEQ ID NO: 341
  REGION 1..107: note = source = /note="Description of Artificial Sequence: Synthetic polypeptide"

SEQ ID NO: 352 - protein, 11 aa, synthetic construct
  REGION 1..11: note = source = /note="Description of Artificial Sequence: Synthetic peptide"
RASQNINVWLT

SEQ ID NO: 353 - protein, 7 aa, synthetic construct
  REGION 1..7: note = source = /note="Description of Artificial Sequence: Synthetic peptide"
KASKSHT

SEQ ID NO: 354 - protein, 9 aa, synthetic construct
  REGION 1..9: note = source = /note="Description of Artificial Sequence: Synthetic peptide"
QQGQSYPYT

SEQ ID NO: 355 - protein, 214 aa, synthetic construct; identical to SEQ ID NO: 345
  REGION 1..214: note = source = /note="Description of Artificial Sequence: Synthetic polypeptide"

SEQ ID NO: 356 - protein, 119 aa, synthetic construct; identical to SEQ ID NO: 296
  REGION 1..119: note = source = /note="Description of Artificial Sequence: Synthetic polypeptide"

SEQ ID NO: 357 - protein, 10 aa, synthetic construct
  REGION 1..10: note = source = /note="Description of Artificial Sequence: Synthetic peptide"
GFTFSSYIMS

SEQ ID NO: 358 - protein, 10 aa, synthetic construct
  REGION 1..10: note = source = /note="Description of Artificial Sequence: Synthetic peptide"
TISGGGTNTY

SEQ ID NO: 359 - protein, 10 aa, synthetic construct
  REGION 1..10: note = source = /note="Description of Artificial Sequence: Synthetic peptide"
WLLSYYAMDY

SEQ ID NO: 360 - protein, 446 aa, synthetic construct; identical to SEQ ID NO: 300
  REGION 1..446: note = source = /note="Description of Artificial Sequence: Synthetic polypeptide"

SEQ ID NO: 361 - protein, 107 aa, synthetic construct
  REGION 1..107: note = source = /note="Description of Artificial Sequence: Synthetic polypeptide"
DIQMTQSPSSLSASVGDRITITCRASQNINVWLTWYQQKPGKAPKLLIYKASKSHTGVPSRFSGSGSGTDFTLTISSLQPEDFATYYCQQGQSYPYTFGQGTKLEIK

SEQ ID NO: 362 - protein, 11 aa, synthetic construct
  REGION 1..11: note = source = /note="Description of Artificial Sequence: Synthetic peptide"
RASQNINVWLT

SEQ ID NO: 363 - protein, 7 aa, synthetic construct
  REGION 1..7: note = source = /note="Description of Artificial Sequence: Synthetic peptide"
KASKSHT

SEQ ID NO: 364 - protein, 9 aa, synthetic construct
  REGION 1..9: note = source = /note="Description of Artificial Sequence: Synthetic peptide"
QQGQSYPYT

SEQ ID NO: 365 - protein, 214 aa, synthetic construct
  REGION 1..214: note = source = /note="Description of Artificial Sequence: Synthetic polypeptide"
DIQMTQSPSSLSASVGDRITITCRASQNINVWLTWYQQKPGKAPKLLIYKASKSHTGVPSRFSGSGSGTDFTLTISSLQPEDFATYYCQQGQSYPYTFGQGTKLEIKRTVAAPSVFIFPPSDEQLKSGTASVVCLLNNFYPREAKVQWKVDNALQSGNSQESVTEQDSKDSTYSLSSTLTLSKADYEKHKVYACEVTHQGLSSPVTKSFNRGEC

SEQ ID NO: 366 - protein, 119 aa, synthetic construct; identical to SEQ ID NO: 306
  REGION 1..119: note = source = /note="Description of Artificial Sequence: Synthetic polypeptide"

SEQ ID NO: 367 - protein, 10 aa, synthetic construct
  REGION 1..10: note = source = /note="Description of Artificial Sequence: Synthetic peptide"
GFTFSSYIMS

SEQ ID NO: 368 - protein, 10 aa, synthetic construct
  REGION 1..10: note = source = /note="Description of Artificial Sequence: Synthetic peptide"
TISGGGTNTY

SEQ ID NO: 369 - protein, 10 aa, synthetic construct
  REGION 1..10: note = source = /note="Description of Artificial Sequence: Synthetic peptide"
WLLSYYAMDY

SEQ ID NO: 370 - protein, 446 aa, synthetic construct; identical to SEQ ID NO: 310
  REGION 1..446: note = source = /note="Description of Artificial Sequence: Synthetic polypeptide"

SEQ ID NO: 371 - protein, 107 aa, synthetic construct; identical to SEQ ID NO: 361
  REGION 1..107: note = source = /note="Description of Artificial Sequence: Synthetic polypeptide"

SEQ ID NO: 372 - protein, 11 aa, synthetic construct
  REGION 1..11: note = source = /note="Description of Artificial Sequence: Synthetic peptide"
RASQNINVWLT

SEQ ID NO: 373 - protein, 7 aa, synthetic construct
  REGION 1..7: note = source = /note="Description of Artificial Sequence: Synthetic peptide"
KASKSHT

SEQ ID NO: 374 - protein, 9 aa, synthetic construct
  REGION 1..9: note = source = /note="Description of Artificial Sequence: Synthetic peptide"
QQGQSYPYT

SEQ ID NO: 375 - protein, 214 aa, synthetic construct; identical to SEQ ID NO: 365
  REGION 1..214: note = source = /note="Description of Artificial Sequence: Synthetic polypeptide"

SEQ ID NO: 376 - protein, 119 aa, synthetic construct
  REGION 1..119: note = source = /note="Description of Artificial Sequence: Synthetic polypeptide"
QVQLVQSGAEVKKPGASVKVSCKASGYTITNYGMNWVRQAPGQGLEWMGWINTYTGEPTYAQKFQGRVTMTRDTSTSTVYMELSSLRSEDTAVYYCARGNGNPLGMDYWGQGTLVTVSS

SEQ ID NO: 377 - protein, 10 aa, synthetic construct
  REGION 1..10: note = source = /note="Description of Artificial Sequence: Synthetic peptide"
GYTITNYGMN

SEQ ID NO: 378 - protein, 10 aa, synthetic construct
  REGION 1..10: note = source = /note="Description of Artificial Sequence: Synthetic peptide"
WINTYTGEPT

SEQ ID NO: 379 - protein, 10 aa, synthetic construct
  REGION 1..10: note = source = /note="Description of Artificial Sequence: Synthetic peptide"
GNGNPLGMDY

SEQ ID NO: 380 - protein, 446 aa, synthetic construct
  REGION 1..446: note = source = /note="Description of Artificial Sequence: Synthetic polypeptide"
QVQLVQSGAEVKKPGASVKVSCKASGYTITNYGMNWVRQAPGQGLEWMGWINTYTGEPTYAQKFQGRVTMTRDTSTSTVYMELSSLRSEDTAVYYCARGNGNPLGMDYWGQGTLVTVSSASTKGPSVFPLAPCSRSTSESTAALGCLVKDYFPEPVTVSWNSGALTSGVHTFPAVLQSSGLYSLSSVVTVPSSSLGTKTYTCNVDHKPSNTKVDKRVESKYGPPCPPCPAPEFLGGPSVFLFPPKPKDTLMISRTPEVTCVVVDVSQEDPEVQFNWYVDGVEVHNAKTKPREEQFNSTYRVVSVLTVLHQDWLNGKEYKCKVSNKGLPSSIEKTISKAKGQPREPQVYTLPPSQEEMTKNQVSLTCLVKGFYPSDIAVEWESNGQPENNYKTTPPVLDSDGSFFLYSRLTVDKSRWQEGNVFSCSVMHEALHNHYTQKSLSLSPGK

SEQ ID NO: 381 - protein, 106 aa, synthetic construct
  REGION 1..106: note = source = /note="Description of Artificial Sequence: Synthetic polypeptide"
EIVLTQSPATLSLSPGERATLSCGNGNPLGMDYWYQQKPGQAPRLLIYDTSKLASGIPARFSGSGSGTDFTLTISSLEPEDFAVYYCFQGSGYPLTFGQGTKLEIK

SEQ ID NO: 382 - protein, 10 aa, synthetic construct
  REGION 1..10: note = source = /note="Description of Artificial Sequence: Synthetic peptide"
GNGNPLGMDY

SEQ ID NO: 383 - protein, 7 aa, synthetic construct
  REGION 1..7: note = source = /note="Description of Artificial Sequence: Synthetic peptide"
DTSKLAS

SEQ ID NO: 384 - protein, 9 aa, synthetic construct
  REGION 1..9: note = source = /note="Description of Artificial Sequence: Synthetic peptide"
FQGSGYPLT

SEQ ID NO: 385 - protein, 213 aa, synthetic construct
  REGION 1..213: note = source = /note="Description of Artificial Sequence: Synthetic polypeptide"
EIVLTQSPATLSLSPGERATLSCGNGNPLGMDYWYQQKPGQAPRLLIYDTSKLASGIPARFSGSGSGTDFTLTISSLEPEDFAVYYCFQGSGYPLTFGQGTKLEIKRTVAAPSVFIFPPSDEQLKSGTASVVCLLNNFYPREAKVQWKVDNALQSGNSQESVTEQDSKDSTYSLSSTLTLSKADYEKHKVYACEVTHQGLSSPVTKSFNRGEC

SEQ ID NO: 386 - protein, 119 aa, synthetic construct
  REGION 1..119: note = source = /note="Description of Artificial Sequence: Synthetic polypeptide"
QVQLVQSGAEVKKPGASVKVSCKASGYTITNYGMNWVRQAPGQGLEWMGWINTYTGEPTYAQKFQGRFTMTLDTSTSTVYMELSSLRSEDTAVYYCARGNGNPLGMDYWGQGTLVTVSS

SEQ ID NO: 387 - protein, 10 aa, synthetic construct
  REGION 1..10: note = source = /note="Description of Artificial Sequence: Synthetic peptide"
GYTITNYGMN

SEQ ID NO: 388 - protein, 10 aa, synthetic construct
  REGION 1..10: note = source = /note="Description of Artificial Sequence: Synthetic peptide"
WINTYTGEPT

SEQ ID NO: 389 - protein, 10 aa, synthetic construct
  REGION 1..10: note = source = /note="Description of Artificial Sequence: Synthetic peptide"
GNGNPLGMDY

SEQ ID NO: 390 - protein, 446 aa, synthetic construct
  REGION 1..446: note = source = /note="Description of Artificial Sequence: Synthetic polypeptide"
QVQLVQSGAEVKKPGASVKVSCKASGYTITNYGMNWVRQAPGQGLEWMGWINTYTGEPTYAQKFQGRFTMTLDTSTSTVYMELSSLRSEDTAVYYCARGNGNPLGMDYWGQGTLVTVSSASTKGPSVFPLAPCSRSTSESTAALGCLVKDYFPEPVTVSWNSGALTSGVHTFPAVLQSSGLYSLSSVVTVPSSSLGTKTYTCNVDHKPSNTKVDKRVESKYGPPCPPCPAPEFLGGPSVFLFPPKPKDTLMISRTPEVTCVVVDVSQEDPEVQFNWYVDGVEVHNAKTKPREEQFNSTYRVVSVLTVLHQDWLNGKEYKCKVSNKGLPSSIEKTISKAKGQPREPQVYTLPPSQEEMTKNQVSLTCLVKGFYPSDIAVEWESNGQPENNYKTTPPVLDSDGSFFLYSRLTVDKSRWQEGNVFSCSVMHEALHNHYTQKSLSLSPGK

SEQ ID NO: 391 - protein, 106 aa, synthetic construct
  REGION 1..106: note = source = /note="Description of Artificial Sequence: Synthetic polypeptide"
EIVLTQSPATLSLSPGERATLSCGNGNPLGMDYWYQQKPGQAPRLLIYDTSKLASGIPARFSGSGSGTDYTLTISSLEPEDFAVYYCFQGSGYPLTFGQGTKLEIK

SEQ ID NO: 392 - protein, 10 aa, synthetic construct
  REGION 1..10: note = source = /note="Description of Artificial Sequence: Synthetic peptide"
GNGNPLGMDY

SEQ ID NO: 393 - protein, 7 aa, synthetic construct
  REGION 1..7: note = source = /note="Description of Artificial Sequence: Synthetic peptide"
DTSKLAS

SEQ ID NO: 394 - protein, 9 aa, synthetic construct
  REGION 1..9: note = source = /note="Description of Artificial Sequence: Synthetic peptide"
FQGSGYPLT

SEQ ID NO: 395 - protein, 213 aa, synthetic construct
  REGION 1..213: note = source = /note="Description of Artificial Sequence: Synthetic polypeptide"
EIVLTQSPATLSLSPGERATLSCGNGNPLGMDYWYQQKPGQAPRLLIYDTSKLASGIPARFSGSGSGTDYTLTISSLEPEDFAVYYCFQGSGYPLTFGQGTKLEIKRTVAAPSVFIFPPSDEQLKSGTASVVCLLNNFYPREAKVQWKVDNALQSGNSQESVTEQDSKDSTYSLSSTLTLSKADYEKHKVYACEVTHQGLSSPVTKSFNRGEC

SEQ ID NO: 396 - protein, 119 aa, synthetic construct; identical to SEQ ID NO: 386
  REGION 1..119: note = source = /note="Description of Artificial Sequence: Synthetic polypeptide"

SEQ ID NO: 397 - protein, 10 aa, synthetic construct
  REGION 1..10: note = source = /note="Description of Artificial Sequence: Synthetic peptide"
GYTITNYGMN

SEQ ID NO: 398 - protein, 10 aa, synthetic construct
  REGION 1..10: note = source = /note="Description of Artificial Sequence: Synthetic peptide"
WINTYTGEPT

SEQ ID NO: 399 - protein, 10 aa, synthetic construct
  REGION 1..10: note = source = /note="Description of Artificial Sequence: Synthetic peptide"
GNGNPLGMDY

SEQ ID NO: 400 - protein, 446 aa, synthetic construct; identical to SEQ ID NO: 390
  REGION 1..446: note = source = /note="Description of Artificial Sequence: Synthetic polypeptide"

SEQ ID NO: 401 - protein, 106 aa, synthetic construct
  REGION 1..106: note = source = /note="Description of Artificial Sequence: Synthetic polypeptide"
EIVLTQSPATLSLSPGERATLSCGNGNPLGMDYWYQQKPGQAPRLWIYDTSKLASGVPARFSGSGSGTDYTLTISSLEPEDFAVYYCFQGSGYPLTFGQGTKLEIK

SEQ ID NO: 402 - protein, 10 aa, synthetic construct
  REGION 1..10: note = source = /note="Description of Artificial Sequence: Synthetic peptide"
GNGNPLGMDY

SEQ ID NO: 403 - protein, 7 aa, synthetic construct
  REGION 1..7: note = source = /note="Description of Artificial Sequence: Synthetic peptide"
DTSKLAS

SEQ ID NO: 404 - protein, 9 aa, synthetic construct
  REGION 1..9: note = source = /note="Description of Artificial Sequence: Synthetic peptide"
FQGSGYPLT

SEQ ID NO: 405 - protein, 213 aa, synthetic construct
  REGION 1..213: note = source = /note="Description of Artificial Sequence: Synthetic polypeptide"
EIVLTQSPATLSLSPGERATLSCGNGNPLGMDYWYQQKPGQAPRLWIYDTSKLASGVPARFSGSGSGTDYTLTISSLEPEDFAVYYCFQGSGYPLTFGQGTKLEIKRTVAAPSVFIFPPSDEQLKSGTASVVCLLNNFYPREAKVQWKVDNALQSGNSQESVTEQDSKDSTYSLSSTLTLSKADYEKHKVYACEVTHQGLSSPVTKSFNRGEC

SEQ ID NO: 406 - protein, 119 aa, synthetic construct; identical to SEQ ID NO: 386
  REGION 1..119: note = source = /note="Description of Artificial Sequence: Synthetic polypeptide"

SEQ ID NO: 407 - protein, 10 aa, synthetic construct
  REGION 1..10: note = source = /note="Description of Artificial Sequence: Synthetic peptide"
GYTITNYGMN

SEQ ID NO: 408 - protein, 10 aa, synthetic construct
  REGION 1..10: note = source = /note="Description of Artificial Sequence: Synthetic peptide"
WINTYTGEPT

SEQ ID NO: 409 - protein, 10 aa, synthetic construct
  REGION 1..10: note = source = /note="Description of Artificial Sequence: Synthetic peptide"
GNGNPLGMDY

SEQ ID NO: 410 - protein, 446 aa, synthetic construct; identical to SEQ ID NO: 390
  REGION 1..446: note = source = /note="Description of Artificial Sequence: Synthetic polypeptide"

SEQ ID NO: 411 - protein, 106 aa, synthetic construct
  REGION 1..106: note = source = /note="Description of Artificial Sequence: Synthetic polypeptide"
EIVLTQSPATLSLSPGERVTMSCGNGNPLGMDYWYQQKPGQAPRLWIYDTSKLASGVPARFSGSGSGTDYTLTISSMEPEDFAVYYCFQGSGYPLTFGQGTKLEIK

SEQ ID NO: 412 - protein, 10 aa, synthetic construct
  REGION 1..10: note = source = /note="Description of Artificial Sequence: Synthetic peptide"
GNGNPLGMDY

SEQ ID NO: 413 - protein, 7 aa, synthetic construct
  REGION 1..7: note = source = /note="Description of Artificial Sequence: Synthetic peptide"
DTSKLAS

SEQ ID NO: 414 - protein, 9 aa, synthetic construct
  REGION 1..9: note = source = /note="Description of Artificial Sequence: Synthetic peptide"
FQGSGYPLT

SEQ ID NO: 415 - protein, 213 aa, synthetic construct
  REGION 1..213: note = source = /note="Description of Artificial Sequence: Synthetic polypeptide"
EIVLTQSPATLSLSPGERVTMSCGNGNPLGMDYWYQQKPGQAPRLWIYDTSKLASGVPARFSGSGSGTDYTLTISSMEPEDFAVYYCFQGSGYPLTFGQGTKLEIKRTVAAPSVFIFPPSDEQLKSGTASVVCLLNNFYPREAKVQWKVDNALQSGNSQESVTEQDSKDSTYSLSSTLTLSKADYEKHKVYACEVTHQGLSSPVTKSFNRGEC

SEQ ID NO: 416 - protein, 119 aa, synthetic construct
  REGION 1..119: note = source = /note="Description of Artificial Sequence: Synthetic polypeptide"
QVQLVQSGAEVKKPGASVKISCKASGYTITNYGMNWVRQAPGQGLEWMGWINTYTGEPTYAQKFQGRFTITLDTSTSTVYLEISSLRSEDTAVYYCARGNGNPLGMDYWGQGTLVTVSS

SEQ ID NO: 417 - protein, 10 aa, synthetic construct
  REGION 1..10: note = source = /note="Description of Artificial Sequence: Synthetic peptide"
GYTITNYGMN

SEQ ID NO: 418 - protein, 10 aa, synthetic construct
  REGION 1..10: note = source = /note="Description of Artificial Sequence: Synthetic peptide"
WINTYTGEPT

SEQ ID NO: 419 - protein, 10 aa, synthetic construct
  REGION 1..10: note = source = /note="Description of Artificial Sequence: Synthetic peptide"
GNGNPLGMDY

SEQ ID NO: 420 - protein, 446 aa, synthetic construct
  REGION 1..446: note = source = /note="Description of Artificial Sequence: Synthetic polypeptide"
QVQLVQSGAEVKKPGASVKISCKASGYTITNYGMNWVRQAPGQGLEWMGWINTYTGEPTYAQKFQGRFTITLDTSTSTVYLEISSLRSEDTAVYYCARGNGNPLGMDYWGQGTLVTVSSASTKGPSVFPLAPCSRSTSESTAALGCLVKDYFPEPVTVSWNSGALTSGVHTFPAVLQSSGLYSLSSVVTVPSSSLGTKTYTCNVDHKPSNTKVDKRVESKYGPPCPPCPAPEFLGGPSVFLFPPKPKDTLMISRTPEVTCVVVDVSQEDPEVQFNWYVDGVEVHNAKTKPREEQFNSTYRVVSVLTVLHQDWLNGKEYKCKVSNKGLPSSIEKTISKAKGQPREPQVYTLPPSQEEMTKNQVSLTCLVKGFYPSDIAVEWESNGQPENNYKTTPPVLDSDGSFFLYSRLTVDKSRWQEGNVFSCSVMHEALHNHYTQKSLSLSPGK

SEQ ID NO: 421 - protein, 106 aa, synthetic construct; identical to SEQ ID NO: 391
  REGION 1..106: note = source = /note="Description of Artificial Sequence: Synthetic polypeptide"

SEQ ID NO: 422 - protein, 10 aa, synthetic construct
  REGION 1..10: note = source = /note="Description of Artificial Sequence: Synthetic peptide"
GNGNPLGMDY

SEQ ID NO: 423 - protein, 7 aa, synthetic construct
  REGION 1..7: note = source = /note="Description of Artificial Sequence: Synthetic peptide"
DTSKLAS

SEQ ID NO: 424 - protein, 9 aa, synthetic construct
  REGION 1..9: note = source = /note="Description of Artificial Sequence: Synthetic peptide"
FQGSGYPLT

SEQ ID NO: 425 - protein, 213 aa, synthetic construct; identical to SEQ ID NO: 395
  REGION 1..213: note = source = /note="Description of Artificial Sequence: Synthetic polypeptide"

SEQ ID NO: 426 - protein, 119 aa, synthetic construct; identical to SEQ ID NO: 416
  REGION 1..119: note = source = /note="Description of Artificial Sequence: Synthetic polypeptide"

SEQ ID NO: 427 - protein, 10 aa, synthetic construct
  REGION 1..10: note = source = /note="Description of Artificial Sequence: Synthetic peptide"
GYTITNYGMN

SEQ ID NO: 428 - protein, 10 aa, synthetic construct
  REGION 1..10: note = source = /note="Description of Artificial Sequence: Synthetic peptide"
WINTYTGEPT

SEQ ID NO: 429 - protein, 10 aa, synthetic construct
  REGION 1..10: note = source = /note="Description of Artificial Sequence: Synthetic peptide"
GNGNPLGMDY

SEQ ID NO: 430 - protein, 446 aa, synthetic construct; identical to SEQ ID NO: 420
  REGION 1..446: note = source = /note="Description of Artificial Sequence: Synthetic polypeptide"

SEQ ID NO: 431 - protein, 106 aa, synthetic construct; identical to SEQ ID NO: 401
  REGION 1..106: note = source = /note="Description of Artificial Sequence: Synthetic polypeptide"

SEQ ID NO: 432 - protein, 10 aa, synthetic construct
  REGION 1..10: note = source = /note="Description of Artificial Sequence: Synthetic peptide"
GNGNPLGMDY

SEQ ID NO: 433 - protein, 7 aa, synthetic construct
  REGION 1..7: note = source = /note="Description of Artificial Sequence: Synthetic peptide"
DTSKLAS

SEQ ID NO: 434 - protein, 9 aa, synthetic construct
  REGION 1..9: note = source = /note="Description of Artificial Sequence: Synthetic peptide"
FQGSGYPLT

SEQ ID NO: 435 - protein, 213 aa, synthetic construct; identical to SEQ ID NO: 405
  REGION 1..213: note = source = /note="Description of Artificial Sequence: Synthetic polypeptide"

SEQ ID NO: 436 - protein, 119 aa, synthetic construct; identical to SEQ ID NO: 416
  REGION 1..119: note = source = /note="Description of Artificial Sequence: Synthetic polypeptide"

SEQ ID NO: 437 - protein, 10 aa, synthetic construct
  REGION 1..10: note = source = /note="Description of Artificial Sequence: Synthetic peptide"
GYTITNYGMN

SEQ ID NO: 438 - protein, 10 aa, synthetic construct
  REGION 1..10: note = source = /note="Description of Artificial Sequence: Synthetic peptide"
WINTYTGEPT

SEQ ID NO: 439 - protein, 10 aa, synthetic construct
  REGION 1..10: note = source = /note="Description of Artificial Sequence: Synthetic peptide"
GNGNPLGMDY

SEQ ID NO: 440 - protein, 446 aa, synthetic construct; identical to SEQ ID NO: 420
  REGION 1..446: note = source = /note="Description of Artificial Sequence: Synthetic polypeptide"

SEQ ID NO: 441 - protein, 106 aa, synthetic construct; identical to SEQ ID NO: 411
  REGION 1..106: note = source = /note="Description of Artificial Sequence: Synthetic polypeptide"

SEQ ID NO: 442 - protein, 10 aa, synthetic construct
  REGION 1..10: note = source = /note="Description of Artificial Sequence: Synthetic peptide"
GNGNPLGMDY

SEQ ID NO: 443 - protein, 7 aa, synthetic construct
  REGION 1..7: note = source = /note="Description of Artificial Sequence: Synthetic peptide"
DTSKLAS

SEQ ID NO: 444 - protein, 9 aa, synthetic construct
  REGION 1..9: note = source = /note="Description of Artificial Sequence: Synthetic peptide"
FQGSGYPLT

SEQ ID NO: 445 - protein, 213 aa, synthetic construct; identical to SEQ ID NO: 415
  REGION 1..213: note = source = /note="Description of Artificial Sequence: Synthetic polypeptide"

SEQ ID NO: 446 - protein, 119 aa, synthetic construct; identical to SEQ ID NO: 296
  REGION 1..119: note = source = /note="Description of Artificial Sequence: Synthetic polypeptide"

SEQ ID NO: 447 - protein, 10 aa, synthetic construct
  REGION 1..10: note = source = /note="Description of Artificial Sequence: Synthetic peptide"
GFTFSSYIMS

SEQ ID NO: 448 - protein, 10 aa, synthetic construct
  REGION 1..10: note = source = /note="Description of Artificial Sequence: Synthetic peptide"
TISGGGTNTY

SEQ ID NO: 449 - protein, 10 aa, synthetic construct
  REGION 1..10: note = source = /note="Description of Artificial Sequence: Synthetic peptide"
WLLSYYAMDY

SEQ ID NO: 450 - protein, 446 aa, synthetic construct; identical to SEQ ID NO: 300
  REGION 1..446: note = source = /note="Description of Artificial Sequence: Synthetic polypeptide"

SEQ ID NO: 451 - protein, 107 aa, synthetic construct
  REGION 1..107: note = source = /note="Description of Artificial Sequence: Synthetic polypeptide"
DIQMTQSPSSLSASVGDRVTITCRASQNINVWLSWYQQKPGKAPKLLIYKASKSHTGVPSRFSGSGSGTDFTLTISSLQPEDFATYYCQQGQSYPYTFGQGTKLEIK

SEQ ID NO: 452 - protein, 11 aa, synthetic construct
  REGION 1..11: note = source = /note="Description of Artificial Sequence: Synthetic peptide"
RASQNINVWLS

SEQ ID NO: 453 - protein, 7 aa, synthetic construct
  REGION 1..7: note = source = /note="Description of Artificial Sequence: Synthetic peptide"
KASKSHT

SEQ ID NO: 454 - protein, 9 aa, synthetic construct
  REGION 1..9: note = source = /note="Description of Artificial Sequence: Synthetic peptide"
QQGQSYPYT

SEQ ID NO: 455 - protein, 214 aa, synthetic construct
  REGION 1..214: note = source = /note="Description of Artificial Sequence: Synthetic polypeptide"
DIQMTQSPSSLSASVGDRVTITCRASQNINVWLSWYQQKPGKAPKLLIYKASKSHTGVPSRFSGSGSGTDFTLTISSLQPEDFATYYCQQGQSYPYTFGQGTKLEIKRTVAAPSVFIFPPSDEQLKSGTASVVCLLNNFYPREAKVQWKVDNALQSGNSQESVTEQDSKDSTYSLSSTLTLSKADYEKHKVYACEVTHQGLSSPVTKSFNRGEC

SEQ ID NO: 456 - protein, 119 aa, synthetic construct; identical to SEQ ID NO: 296
  REGION 1..119: note = source = /note="Description of Artificial Sequence: Synthetic polypeptide"

SEQ ID NO: 457 - protein, 10 aa, synthetic construct
  REGION 1..10: note = source = /note="Description of Artificial Sequence: Synthetic peptide"
GFTFSSYIMS

SEQ ID NO: 458 - protein, 10 aa, synthetic construct
  REGION 1..10: note = source = /note="Description of Artificial Sequence: Synthetic peptide"
TISGGGTNTY

SEQ ID NO: 459 - protein, 10 aa, synthetic construct
  REGION 1..10: note = source = /note="Description of Artificial Sequence: Synthetic peptide"
WLLSYYAMDY

SEQ ID NO: 460 - protein, 446 aa, synthetic construct; identical to SEQ ID NO: 300
  REGION 1..446: note = source = /note="Description of Artificial Sequence: Synthetic polypeptide"

SEQ ID NO: 461 - protein, 107 aa, synthetic construct
  REGION 1..107: note = source = /note="Description of Artificial Sequence: Synthetic polypeptide"
DIQMTQSPSSLSASVGDRITITCRASQNINVWLSWYQQKPGKAPKLLIYKASKSHTGVPSRFSGSGSGTDFTLTISSLQPEDFATYYCQQGQSYPYTFGQGTKLEIK

SEQ ID NO: 462 - protein, 11 aa, synthetic construct
  REGION 1..11: note = source = /note="Description of Artificial Sequence: Synthetic peptide"
RASQNINVWLS

SEQ ID NO: 463 - protein, 7 aa, synthetic construct
  REGION 1..7: note = source = /note="Description of Artificial Sequence: Synthetic peptide"
KASKSHT

SEQ ID NO: 464 - protein, 9 aa, synthetic construct
  REGION 1..9: note = source = /note="Description of Artificial Sequence: Synthetic peptide"
QQGQSYPYT

SEQ ID NO: 465 - protein, 214 aa, synthetic construct
  REGION 1..214: note = source = /note="Description of Artificial Sequence: Synthetic polypeptide"
DIQMTQSPSSLSASVGDRITITCRASQNINVWLSWYQQKPGKAPKLLIYKASKSHTGVPSRFSGSGSGTDFTLTISSLQPEDFATYYCQQGQSYPYTFGQGTKLEIKRTVAAPSVFIFPPSDEQLKSGTASVVCLLNNFYPREAKVQWKVDNALQSGNSQESVTEQDSKDSTYSLSSTLTLSKADYEKHKVYACEVTHQGLSSPVTKSFNRGEC

SEQ ID NO: 466 - protein, 119 aa, synthetic construct; identical to SEQ ID NO: 306
  REGION 1..119: note = source = /note="Description of Artificial Sequence: Synthetic polypeptide"

SEQ ID NO: 467 - protein, 10 aa, synthetic construct
  REGION 1..10: note = source = /note="Description of Artificial Sequence: Synthetic peptide"
GFTFSSYIMS

SEQ ID NO: 468 - protein, 10 aa, synthetic construct
  REGION 1..10: note = source = /note="Description of Artificial Sequence: Synthetic peptide"
TISGGGTNTY

SEQ ID NO: 469 - protein, 10 aa, synthetic construct
  REGION 1..10: note = source = /note="Description of Artificial Sequence: Synthetic peptide"
WLLSYYAMDY

SEQ ID NO: 470 - protein, 446 aa, synthetic construct; identical to SEQ ID NO: 310
  REGION 1..446: note = source = /note="Description of Artificial Sequence: Synthetic polypeptide"

SEQ ID NO: 471 - protein, 107 aa, synthetic construct; identical to SEQ ID NO: 451
  REGION 1..107: note = source = /note="Description of Artificial Sequence: Synthetic polypeptide"

SEQ ID NO: 472 - protein, 11 aa, synthetic construct
  REGION 1..11: note = source = /note="Description of Artificial Sequence: Synthetic peptide"
RASQNINVWLS

SEQ ID NO: 473 - protein, 7 aa, synthetic construct
  REGION 1..7: note = source = /note="Description of Artificial Sequence: Synthetic peptide"
KASKSHT

SEQ ID NO: 474 - protein, 9 aa, synthetic construct
  REGION 1..9: note = source = /note="Description of Artificial Sequence: Synthetic peptide"
QQGQSYPYT

SEQ ID NO: 475 - protein, 214 aa, synthetic construct; identical to SEQ ID NO: 455
  REGION 1..214: note = source = /note="Description of Artificial Sequence: Synthetic polypeptide"

SEQ ID NO: 476 - protein, 119 aa, synthetic construct; identical to SEQ ID NO: 306
  REGION 1..119: note = source = /note="Description of Artificial Sequence: Synthetic polypeptide"

SEQ ID NO: 477 - protein, 10 aa, synthetic construct
  REGION 1..10: note = source = /note="Description of Artificial Sequence: Synthetic peptide"
GFTFSSYIMS

SEQ ID NO: 478 - protein, 10 aa, synthetic construct
  REGION 1..10: note = source = /note="Description of Artificial Sequence: Synthetic peptide"
TISGGGTNTY

SEQ ID NO: 479 - protein, 10 aa, synthetic construct
  REGION 1..10: note = source = /note="Description of Artificial Sequence: Synthetic peptide"
WLLSYYAMDY

SEQ ID NO: 480 - protein, 446 aa, synthetic construct; identical to SEQ ID NO: 310
  REGION 1..446: note = source = /note="Description of Artificial Sequence: Synthetic polypeptide"

SEQ ID NO: 481 - protein, 107 aa, synthetic construct; identical to SEQ ID NO: 461
  REGION 1..107: note = source = /note="Description of Artificial Sequence: Synthetic polypeptide"

SEQ ID NO: 482 - protein, 11 aa, synthetic construct
  REGION 1..11: note = source = /note="Description of Artificial Sequence: Synthetic peptide"
RASQNINVWLS

SEQ ID NO: 483 - protein, 7 aa, synthetic construct
  REGION 1..7: note = source = /note="Description of Artificial Sequence: Synthetic peptide"
KASKSHT

SEQ ID NO: 484 - protein, 9 aa, synthetic construct
  REGION 1..9: note = source = /note="Description of Artificial Sequence: Synthetic peptide"
QQGQSYPYT

SEQ ID NO: 485 - protein, 214 aa, synthetic construct; identical to SEQ ID NO: 465
  REGION 1..214: note = source = /note="Description of Artificial Sequence: Synthetic polypeptide"

SEQ ID NO: 486 - protein, 117 aa, synthetic construct
  REGION 1..117: note = source = /note="Description of Artificial Sequence: Synthetic polypeptide"
EVQLQQSGPELVKPGASMKISCKASGYSFTGYTMNWVRQSHGKNLEWLGLIFPYNGGTSYNQNFKGKATLTVDTSSSTAYMELLSLTSVDSAVYYCARGVRFALDYWGQGTSVSVSS

SEQ ID NO: 487 - protein, 10 aa, synthetic construct
  REGION 1..10: note = source = /note="Description of Artificial Sequence: Synthetic peptide"
GYSFTGYTMN

SEQ ID NO: 488 - protein, 10 aa, synthetic construct
  REGION 1..10: note = source = /note="Description of Artificial Sequence: Synthetic peptide"
LIFPYNGGTS

SEQ ID NO: 489 - protein, 8 aa, synthetic construct
  REGION 1..8: note = source = /note="Description of Artificial Sequence: Synthetic peptide"
GVRFALDY

SEQ ID NO: 490 - protein, 112 aa, synthetic construct
  REGION 1..112: note = source = /note="Description of Artificial Sequence: Synthetic polypeptide"
DVVMTQTPLSLPVSFGDQVSISCRSSQSLANSYGNTYLSWYLHKPGQSPQLLIYEISNRFSGVPDRFSGSGSGTDFTLNISTIKPEDLGMYYCLQGTHQPWTFGGGTKLEIK

SEQ ID NO: 491 - protein, 16 aa, synthetic construct
  REGION 1..16: note = source = /note="Description of Artificial Sequence: Synthetic peptide"
RSSQSLANSYGNTYLS

SEQ ID NO: 492 - protein, 7 aa, synthetic construct
  REGION 1..7: note = source = /note="Description of Artificial Sequence: Synthetic peptide"
EISNRFS

SEQ ID NO: 493 - protein, 9 aa, synthetic construct
  REGION 1..9: note = source = /note="Description of Artificial Sequence: Synthetic peptide"
LQGTHQPWT

SEQ ID NO: 494 - protein, 119 aa, synthetic construct; identical to SEQ ID NO: 126
  REGION 1..119: note = source = /note="Description of Artificial Sequence: Synthetic polypeptide"

SEQ ID NO: 495 - protein, 8 aa, synthetic construct
  REGION 1..8: note = source = /note="Description of Artificial Sequence: Synthetic peptide"
GYTFSSYV

SEQ ID NO: 496 - protein, 8 aa, synthetic construct
  REGION 1..8: note = source = /note="Description of Artificial Sequence: Synthetic peptide"
IDPYNDGA

SEQ ID NO: 497 - protein, 12 aa, synthetic construct
  REGION 1..12: note = source = /note="Description of Artificial Sequence: Synthetic peptide"
ARGGPYGWYFDV

SEQ ID NO: 498 - protein, 443 aa, synthetic construct
  REGION 1..443: note = source = /note="Description of Artificial Sequence: Synthetic polypeptide"
EVQLQQSGPELVKPGSSVKMSCKASGYTFSSYVMHWVKQKPGQGLEWIGYIDPYNDGAKYNEKFKGKATLTSDKSSSTAYMELSSLTSEDSAVYYCARGGPYGWYFDVWGAGTTVTVSSAKTTPPSVYPLAPGSAAQTNSMVTLGCLVKGYFPEPVTVTWNSGSLSSGVHTFPAVLQSDLYTLSSSVTVPSSTWPSETVTCNVAHPASSTKVDKKIVPRDCGCKPCICTVPEVSSVFIFPPKPKDVLTITLTPKVTCVVVDISKDDPEVQFSWFVDDVEVHTAQTQPREEQFNSTFRSVSELPIMHQDWLNGKEFKCRVNSAAFPAPIEKTISKTKGRPKAPQVYTIPPPKEQMAKDKVSLTCMITDFFPEDITVEWQWNGQPAENYKNTQPIMDTDGSYFVYSKLNVQKSNWEAGNTFTCSVLHEGLHNHHTEKSLSHSPGK

SEQ ID NO: 499 - protein, 107 aa, synthetic construct; identical to SEQ ID NO: 131
  REGION 1..107: note = source = /note="Description of Artificial Sequence: Synthetic polypeptide"

SEQ ID NO: 500 - protein, 6 aa, synthetic construct
  REGION 1..6: note = source = /note="Description of Artificial Sequence: Synthetic peptide"
EHIYSY

SEQ ID NO: 501 - skipped

SEQ ID NO: 502 - protein, 9 aa, synthetic construct
  REGION 1..9: note = source = /note="Description of Artificial Sequence: Synthetic peptide"
QHHFGSPLT

SEQ ID NO: 503 - protein, 214 aa, synthetic construct
  REGION 1..214: note = source = /note="Description of Artificial Sequence: Synthetic polypeptide"
DIQMTQSPASLSASVGETVTITCRASEHIYSYLSWYQQKQGKSPQLLVYNAKTLAEGVPSRFSGSGSGTQFSLKINSLQPEDFGTYYCQHHFGSPLTFGAGTTLELKRADAAPTVSIFPPSSEQLTSGGASVVCFLNNFYPKDINVKWKIDGSERQNGVLNSWTDQDSKDSTYSMSSTLTLTKDEYERHNSYTCEATHKTSTSPIVKSFNRNEC

SEQ ID NO: 504 - protein, 130 aa, synthetic construct; identical to SEQ ID NO: 136
  REGION 1..130: note = source = /note="Description of Artificial Sequence: Synthetic polypeptide"

SEQ ID NO: 505 - protein, 10 aa, synthetic construct
  REGION 1..10: note = source = /note="Description of Artificial Sequence: Synthetic peptide"
GGSVSSGIYY

SEQ ID NO: 506 - protein, 7 aa, synthetic construct
  REGION 1..7: note = source = /note="Description of Artificial Sequence: Synthetic peptide"
IYYSGST

SEQ ID NO: 507 - protein, 22 aa, synthetic construct
  REGION 1..22: note = source = /note="Description of Artificial Sequence: Synthetic peptide"
ARDYYVSGNYYNVDYYFFGVDV

SEQ ID NO: 508 - protein, 454 aa, synthetic construct
  REGION 1..454: note = source = /note="Description of Artificial Sequence: Synthetic polypeptide"
QVHLQESGPGLVKPSETLSLTCTVSGGSVSSGIYYWSWIRQPPGKGLEWIGYIYYSGSTNYNPSLKSRVTISVDTSKNQFSLKLSSVTAADTAVYYCARDYYVSGNYYNVDYYFFGVDVWGQGTTVTVSSAKTTPPSVYPLAPGSAAQTNSMVTLGCLVKGYFPEPVTVTWNSGSLSSGVHTFPAVLQSDLYTLSSSVTVPSSTWPSETVTCNVAHPASSTKVDKKIVPRDCGCKPCICTVPEVSSVFIFPPKPKDVLTITLTPKVTCVVVDISKDDPEVQFSWFVDDVEVHTAQTQPREEQFNSTFRSVSELPIMHQDWLNGKEFKCRVNSAAFPAPIEKTISKTKGRPKAPQVYTIPPPKEQMAKDKVSLTCMITDFFPEDITVEWQWNGQPAENYKNTQPIMDTDGSYFVYSKLNVQKSNWEAGNTFTCSVLHEGLHNHHTEKSLSHSPGK

SEQ ID NO: 509 - protein, 109 aa, synthetic construct; identical to SEQ ID NO: 141
  REGION 1..109: note = source = /note="Description of Artificial Sequence: Synthetic polypeptide"

SEQ ID NO: 510 - protein, 6 aa, synthetic construct
  REGION 1..6: note = source = /note="Description of Artificial Sequence: Synthetic peptide"
QSVSSY

SEQ ID NO: 511 - skipped

SEQ ID NO: 512 - protein, 11 aa, synthetic construct
  REGION 1..11: note = source = /note="Description of Artificial Sequence: Synthetic peptide"
QQRSNWPPLFT

SEQ ID NO: 513 - protein, 216 aa, synthetic construct
  REGION 1..216: note = source = /note="Description of Artificial Sequence: Synthetic polypeptide"
EIVLTQSPATLSLSPGERATLSCRASQSVSSYLAWYQQKPGQAPRLLIYDASNRATGIPARFSGSGSGTDFTLTISSLEPEDFAVYYCQQRSNWPPLFTFGPGTKVDIKRADAAPTVSIFPPSSEQLTSGGASVVCFLNNFYPKDINVKWKIDGSERQNGVLNSWTDQDSKDSTYSMSSTLTLTKDEYERHNSYTCEATHKTSTSPIVKSFNRNEC

SEQ ID NO: 514 - protein, 119 aa, synthetic construct
  REGION 1..119: note = source = /note="Description of Artificial Sequence: Synthetic polypeptide"
DVQLVESGGGLVQPGGSRKLSCAASGFTFSNFGMHWVRQAPEKGLEWVAFISSGSSSIYYADTVKGRFTISRDNPKNTLFLQMTSLRSEDTAMYYCARMRLDYYAMDYWGQGTSVTVSS

SEQ ID NO: 515 - protein, 5 aa, synthetic construct
  REGION 1..5: note = source = /note="Description of Artificial Sequence: Synthetic peptide"
NFGMH

SEQ ID NO: 516 - protein, 17 aa, synthetic construct
  REGION 1..17: note = source = /note="Description of Artificial Sequence: Synthetic peptide"
FISSGSSSIYYADTVKG

SEQ ID NO: 517 - protein, 10 aa, synthetic construct
  REGION 1..10: note = source = /note="Description of Artificial Sequence: Synthetic peptide"
MRLDYYAMDY

SEQ ID NO: 518 - protein, 107 aa, synthetic construct
  REGION 1..107: note = source = /note="Description of Artificial Sequence: Synthetic polypeptide"
DVQITQSPSYLAASPGETITINCRASKSISKYLAWYQEKPGKTNKLLIYSGSTLQSGIPSRFSGSGSGTDFTLTISSLEPEDFAMYYCQQHNEYPWTFGGGTKLEIK

SEQ ID NO: 519 - protein, 11 aa, synthetic construct
  REGION 1..11: note = source = /note="Description of Artificial Sequence: Synthetic peptide"
RASKSISKYLA

SEQ ID NO: 520 - protein, 7 aa, synthetic construct
  REGION 1..7: note = source = /note="Description of Artificial Sequence: Synthetic peptide"
SGSTLQS

SEQ ID NO: 521 - protein, 9 aa, synthetic construct
  REGION 1..9: note = source = /note="Description of Artificial Sequence: Synthetic peptide"
QQHNEYPWT

SEQ ID NO: 522 - protein, 119 aa, synthetic construct
  REGION 1..119: note = source = /note="Description of Artificial Sequence: Synthetic polypeptide"
EVQLQQSGPELVKPGASVKISCKTSGYTFTEYTMHWVKQSHGKNLEWIGGINPNNGGTSYNQKFKGRATLTVDKSSSTAYMELRSLTSDDSAVYYCARPGWYNYAMDYWGQGTSVTVSS

SEQ ID NO: 523 - protein, 5 aa, synthetic construct
  REGION 1..5: note = source = /note="Description of Artificial Sequence: Synthetic peptide"
EYTMH

SEQ ID NO: 524 - protein, 17 aa, synthetic construct
  REGION 1..17: note = source = /note="Description of Artificial Sequence: Synthetic peptide"
GINPNNGGTSYNQKFKG

SEQ ID NO: 525 - protein, 10 aa, synthetic construct
  REGION 1..10: note = source = /note="Description of Artificial Sequence: Synthetic peptide"
PGWYNYAMDY

SEQ ID NO: 526 - protein, 107 aa, synthetic construct
  REGION 1..107: note = source = /note="Description of Artificial Sequence: Synthetic polypeptide"
DIVMTQSHKFMSTSVGDRVNITCKASQGVSTAVAWYQQKPGQSPKLLIYSASYRYTGVPDRFTGSGSGTDFTFTISSVQAEDLAVYHCQQHYITPWTFGGGTKLEIK

SEQ ID NO: 527 - protein, 11 aa, synthetic construct
  REGION 1..11: note = source = /note="Description of Artificial Sequence: Synthetic peptide"
KASQGVSTAVA

SEQ ID NO: 528 - protein, 7 aa, synthetic construct
  REGION 1..7: note = source = /note="Description of Artificial Sequence: Synthetic peptide"
SASYRYT

SEQ ID NO: 529 - protein, 9 aa, synthetic construct
  REGION 1..9: note = source = /note="Description of Artificial Sequence: Synthetic peptide"
QQHYITPWT

SEQ ID NO: 530 - protein, 119 aa, synthetic construct
  REGION 1..119: note = source = /note="Description of Artificial Sequence: Synthetic polypeptide"
EVQLVESGGGLVKPGGSLKLSCAASGFAFSDYDMSWVRQTPEKRLEWVAYISDGGYNTYYPDTVKGRFTISRDNAKNTLYLQMSSLKSEDTAIYYCARQILLRYYFDYWGQGTTLTVSS

SEQ ID NO: 531 - protein, 5 aa, synthetic construct
  REGION 1..5: note = source = /note="Description of Artificial Sequence: Synthetic peptide"
DYDMS

SEQ ID NO: 532 - protein, 17 aa, synthetic construct
  REGION 1..17: note = source = /note="Description of Artificial Sequence: Synthetic peptide"
YISDGGYNTYYPDTVKG

SEQ ID NO: 533 - protein, 10 aa, synthetic construct
  REGION 1..10: note = source = /note="Description of Artificial Sequence: Synthetic peptide"
QILLRYYFDY

SEQ ID NO: 534 - protein, 113 aa, synthetic construct
  REGION 1..113: note = source = /note="Description of Artificial Sequence: Synthetic polypeptide"
DIVMSQSPSSLAVSVGEKVTMTCKSSQSLLYSSNQKNYLAWYQQKPGQSPKLLIYWASTRESGVPDRFTGSGSGTDFTLTISSVKAEDLAVYYCQQYHSYPWTFGGGTKLEIK

SEQ ID NO: 535 - protein, 17 aa, synthetic construct
  REGION 1..17: note = source = /note="Description of Artificial Sequence: Synthetic peptide"
KSSQSLLYSSNQKNYLA

SEQ ID NO: 536 - protein, 7 aa, synthetic construct
  REGION 1..7: note = source = /note="Description of Artificial Sequence: Synthetic peptide"
WASTRES

SEQ ID NO: 537 - protein, 9 aa, synthetic construct
  REGION 1..9: note = source = /note="Description of Artificial Sequence: Synthetic peptide"
QQYHSYPWT

SEQ ID NO: 538 - protein, 119 aa, synthetic construct
  REGION 1..119: note = source = /note="Description of Artificial Sequence: Synthetic polypeptide"
EVQLVESGGGLVQPGGSLRLSCAASGFTFSNFGMHWVRQAPGKGLEWVAFISSGSSSIYYADTVKGRFTISRDNAKNSLYLQMNSLRAEDTAVYYCARMRLDYYAMDYWGQGTMVTVSS

SEQ ID NO: 539 - protein, 107 aa, synthetic construct
  REGION 1..107: note = source = /note="Description of Artificial Sequence: Synthetic polypeptide"
DIQMTQSPSSLSASVGDRVTITCRASKSISKYLAWYQQKPGKAPKLLIYSGSTLQSGVPSRFSGSGSGTDFTLTISSLQPEDFATYYCQQHNEYPWTFGGGTKVEIK

SEQ ID NO: 540 - protein, 138 aa, synthetic construct
  REGION 1..138: note = source = /note="Description of Artificial Sequence: Synthetic polypeptide"
MDSRLNLVFLVLILKGVQCEVQLVESGGGLVQPGGSLRLSCAASGFTFSNFGMHWVRQAPGKGLEWVAFISSGSSSIYYADTVKGRFTISRDNAKNSLYLQMNSLRAEDTAVYYCARMRLDYYAMDYWGQGTMVTVSS

SEQ ID NO: 541 - protein, 127 aa, synthetic construct
  REGION 1..127: note = source = /note="Description of Artificial Sequence: Synthetic polypeptide"
MRFQVQVLGLLLLWISGAQCDIQMTQSPSSLSASVGDRVTITCRASKSISKYLAWYQQKPGKAPKLLIYSGSTLQSGVPSRFSGSGSGTDFTLTISSLQPEDFATYYCQQHNEYPWTFGGGTKVEIK

SEQ ID NO: 542 - protein, 119 aa, synthetic construct
  REGION 1..119: note = source = /note="Description of Artificial Sequence: Synthetic polypeptide"
EVQLVESGGGLTQPGKSLKLSCEASGFTFSSFTMHWVRQSPGKGLEWVAFIRSGSGIVFYADAVRGRFTISRDNAKNLLFLQMNDLKSEDTAMYYCARRPLGHNTFDSWGQGTLVTVSS

SEQ ID NO: 543 - protein, 10 aa, synthetic construct
  REGION 1..10: note = source = /note="Description of Artificial Sequence: Synthetic peptide"
GFTFSSFTMH

SEQ ID NO: 544 - protein, 17 aa, synthetic construct
  REGION 1..17: note = source = /note="Description of Artificial Sequence: Synthetic peptide"
FIRSGSGIVFYADAVRG

SEQ ID NO: 545 - protein, 10 aa, synthetic construct
  REGION 1..10: note = source = /note="Description of Artificial Sequence: Synthetic peptide"
RPLGHNTFDS

SEQ ID NO: 546 - protein, 114 aa, synthetic construct
  REGION 1..114: note = source = /note="Description of Artificial Sequence: Synthetic polypeptide"
DIVMTQSPSSLAVSPGEKVTMTCKSSQSLYYSGVKENLLAWYQQKPGQSPKLLIYYASIRFTGVPDRFTGSGSGTDYTLTITSVQAEDMGQYFCQQGINNPLTFGDGTKLEIKR

SEQ ID NO: 547 - protein, 17 aa, synthetic construct
  REGION 1..17: note = source = /note="Description of Artificial Sequence: Synthetic peptide"
KSSQSLYYSGVKENLLA

SEQ ID NO: 548 - protein, 6 aa, synthetic construct
  REGION 1..6: note = source = /note="Description of Artificial Sequence: Synthetic peptide"
ASIRFT

SEQ ID NO: 549 - protein, 9 aa, synthetic construct
  REGION 1..9: note = source = /note="Description of Artificial Sequence: Synthetic peptide"
QQGINNPLT

SEQ ID NO: 550 - protein, 119 aa, synthetic construct
  REGION 1..119: note = source = /note="Description of Artificial Sequence: Synthetic polypeptide"
EVQLQQSGPELVKPGTSMKISCKASGYSFTGHLMNWVKQSHGKNLEWIGLIIPYNGGTSYNQKFKGKATLTVDKSSSTAYMELLSLTSDDSAVYFCSRGLRGFYAMDYWGQGTSVTVSS

SEQ ID NO: 551 - protein, 10 aa, synthetic construct
  REGION 1..10: note = source = /note="Description of Artificial Sequence: Synthetic peptide"
GYSFTGHLMN

SEQ ID NO: 552 - protein, 17 aa, synthetic construct
  REGION 1..17: note = source = /note="Description of Artificial Sequence: Synthetic peptide"
LIIPYNGGTSYNQKFKG

SEQ ID NO: 553 - protein, 10 aa, synthetic construct
  REGION 1..10: note = source = /note="Description of Artificial Sequence: Synthetic peptide"
GLRGFYAMDY

SEQ ID NO: 554 - protein, 112 aa, synthetic construct
  REGION 1..112: note = source = /note="Description of Artificial Sequence: Synthetic polypeptide"
DVVLTQTPLSLSVSFGDQVSISCRSSQSLVNSYGNTFLSWYLHKPGQSPQLLIFGISNRFSGVPDRFSGSGSGTDFTLKISTIKPEDLGMYYCLQGTHQPPTFGPGTKLEVK

SEQ ID NO: 555 - protein, 16 aa, synthetic construct
  REGION 1..16: note = source = /note="Description of Artificial Sequence: Synthetic peptide"
RSSQSLVNSYGNTFLS

SEQ ID NO: 556 - protein, 7 aa, synthetic construct
  REGION 1..7: note = source = /note="Description of Artificial Sequence: Synthetic peptide"
GISNRFS

SEQ ID NO: 557 - protein, 9 aa, synthetic construct
  REGION 1..9: note = source = /note="Description of Artificial Sequence: Synthetic peptide"
LQGTHQPPT

SEQ ID NO: 558 - protein, 11 aa, synthetic construct
  REGION 1..11: note = source = /note="Description of Artificial Sequence: Synthetic peptide"
GSITSSSYYWG

SEQ ID NO: 559 - protein, 11 aa, synthetic construct
  REGION 1..11: note = source = /note="Description of Artificial Sequence: Synthetic peptide"
GSISSSKYYWG

SEQ ID NO: 560 - protein, 11 aa, synthetic construct
  REGION 1..11: note = source = /note="Description of Artificial Sequence: Synthetic peptide"
GSISSTSHYWG

SEQ ID NO: 561 - protein, 11 aa, synthetic construct
  REGION 1..11: note = source = /note="Description of Artificial Sequence: Synthetic peptide"
GSISSTSHYWG

SEQ ID NO: 562 - protein, 11 aa, synthetic construct
  REGION 1..11: note = source = /note="Description of Artificial Sequence: Synthetic peptide"
GSISSTSHYWG

SEQ ID NO: 563 - protein, 16 aa, synthetic construct
  REGION 1..16: note = source = /note="Description of Artificial Sequence: Synthetic peptide"
SIYYSGATFYNPSLKS

SEQ ID NO: 564 - protein, 16 aa, synthetic construct
  REGION 1..16: note = source = /note="Description of Artificial Sequence: Synthetic peptide"
SIYYSGSTFYNPSLKS

SEQ ID NO: 565 - protein, 16 aa, synthetic construct
  REGION 1..16: note = source = /note="Description of Artificial Sequence: Synthetic peptide"
SIYYSGSTFYNPSLKS

SEQ ID NO: 566 - protein, 16 aa, synthetic construct
  REGION 1..16: note = source = /note="Description of Artificial Sequence: Synthetic peptide"
SIYYSGSTFYNPSLKS

SEQ ID NO: 567 - protein, 16 aa, synthetic construct
  REGION 1..16: note = source = /note="Description of Artificial Sequence: Synthetic peptide"
SIYYSGSTFYNPSLKG

SEQ ID NO: 568 - protein, 15 aa, synthetic construct
  REGION 1..15: note = source = /note="Description of Artificial Sequence: Synthetic peptide"
ARDANYYGSAWAFDP

SEQ ID NO: 569 - protein, 15 aa, synthetic construct
  REGION 1..15: note = source = /note="Description of Artificial Sequence: Synthetic peptide"
ARDANYYGSAWAFDP

SEQ ID NO: 570 - protein, 15 aa, synthetic construct
  REGION 1..15: note = source = /note="Description of Artificial Sequence: Synthetic peptide"
ARDANYYGSAWAFDP

SEQ ID NO: 571 - protein, 15 aa, synthetic construct
  REGION 1..15: note = source = /note="Description of Artificial Sequence: Synthetic peptide"
ARDANYYGGAWAFDP

SEQ ID NO: 572 - protein, 15 aa, synthetic construct
  REGION 1..15: note = source = /note="Description of Artificial Sequence: Synthetic peptide"
ARDANYYGSAWAFDP

SEQ ID NO: 573 - protein, 123 aa, synthetic construct
  REGION 1..123: note = source = /note="Description of Artificial Sequence: Synthetic polypeptide"
QLQLQESGPGLVKPSETLSLTCTVSGGSITSSSYYWGWIRQPPGKGLEWIGSIYYSGATFYNPSLKSRVTISVDTSKNQFSLKLSSVTAADTAVYYCARDANYYGSAWAFDPWGQGTLVTVSS

SEQ ID NO: 574 - protein, 123 aa, synthetic construct
  REGION 1..123: note = source = /note="Description of Artificial Sequence: Synthetic polypeptide"
QLQLQESGPGLVKPSETLSLTCTVSGGSISSSKYYWGWIRQPPGKGLEWIGSIYYSGSTFYNPSLKSRVTISVDTSKNQFSLKLSSVTAADTAVYYCARDANYYGSAWAFDPWGQGTLVTVSS

SEQ ID NO: 575 - protein, 123 aa, synthetic construct
  REGION 1..123: note = source = /note="Description of Artificial Sequence: Synthetic polypeptide"
QLQLQESGPGLVKPSETLSLTCTVSGGSISSTSHYWGWIRQPPGKGLEWIGSIYYSGSTFYNPSLKSRVTISVDTSKNQFSLKLSSVTAADTAVYYCARDANYYGSAWAFDPWGQGTLVTVSS

SEQ ID NO: 576 - protein, 123 aa, synthetic construct
  REGION 1..123: note = source = /note="Description of Artificial Sequence: Synthetic polypeptide"
QLQLQESGPGLVKPSETLSLTCTVSGGSISSTSHYWGWIRQPPGKGLEWIGSIYYSGSTFYNPSLKSRVTISVDTSKNQFSLKLSSVTAADTAVYYCARDANYYGGAWAFDPWGQGTLVTVSS

SEQ ID NO: 577 - protein, 123 aa, synthetic construct
  REGION 1..123: note = source = /note="Description of Artificial Sequence: Synthetic polypeptide"
QLQLQESGPGLVKPSETLSLTCTVSGGSISSTSHYWGWIRQPPGKGLEWIGSIYYSGSTFYNPSLKGRVTISVDTSKNQFSLKLSSVTAADTAVYYCARDANYYGSAWAFDPWGQGTLVTVSS

SEQ ID NO: 578 - protein, 11 aa, synthetic construct
  REGION 1..11: note = source = /note="Description of Artificial Sequence: Synthetic peptide"
RASQSVSSYLA

SEQ ID NO: 579 - protein, 11 aa, synthetic construct
  REGION 1..11: note = source = /note="Description of Artificial Sequence: Synthetic peptide"
RASQSVSSYLA

SEQ ID NO: 580 - protein, 11 aa, synthetic construct
  REGION 1..11: note = source = /note="Description of Artificial Sequence: Synthetic peptide"
RASQSVSSYLA

SEQ ID NO: 581 - protein, 11 aa, synthetic construct
  REGION 1..11: note = source = /note="Description of Artificial Sequence: Synthetic peptide"
RASQSVSSYLA

SEQ ID NO: 582 - protein, 11 aa, synthetic construct
  REGION 1..11: note = source = /note="Description of Artificial Sequence: Synthetic peptide"
RASQSVSSYLA

SEQ ID NO: 583 - protein, 7 aa, synthetic construct
  REGION 1..7: note = source = /note="Description of Artificial Sequence: Synthetic peptide"
DASNRAT

SEQ ID NO: 584 - protein, 7 aa, synthetic construct
  REGION 1..7: note = source = /note="Description of Artificial Sequence: Synthetic peptide"
DASNRAT

SEQ ID NO: 585 - protein, 7 aa, synthetic construct
  REGION 1..7: note = source = /note="Description of Artificial Sequence: Synthetic peptide"
DASNRAT

SEQ ID NO: 586 - protein, 7 aa, synthetic construct
  REGION 1..7: note = source = /note="Description of Artificial Sequence: Synthetic peptide"
DASNRAT

SEQ ID NO: 587 - protein, 7 aa, synthetic construct
  REGION 1..7: note = source = /note="Description of Artificial Sequence: Synthetic peptide"
DASNRAT

SEQ ID NO: 588 - protein, 8 aa, synthetic construct
  REGION 1..8: note = source = /note="Description of Artificial Sequence: Synthetic peptide"
QQHFNLPT

SEQ ID NO: 589 - protein, 8 aa, synthetic construct
  REGION 1..8: note = source = /note="Description of Artificial Sequence: Synthetic peptide"
QQHFNLPT

SEQ ID NO: 590 - protein, 8 aa, synthetic construct
  REGION 1..8: note = source = /note="Description of Artificial Sequence: Synthetic peptide"
QQHFNLPT

SEQ ID NO: 591 - protein, 8 aa, synthetic construct
  REGION 1..8: note = source = /note="Description of Artificial Sequence: Synthetic peptide"
QQHFNLPT

SEQ ID NO: 592 - protein, 8 aa, synthetic construct
  REGION 1..8: note = source = /note="Description of Artificial Sequence: Synthetic peptide"
QQHFNLPT

SEQ ID NO: 593 - protein, 106 aa, synthetic construct
  REGION 1..106: note = source = /note="Description of Artificial Sequence: Synthetic polypeptide"
EIVLTQSPATLSLSPGERATLSCRASQSVSSYLAWYQQKPGQAPRLLIYDASNRATGIPARFSGSGSGTDFTLTISSLEPEDFAVYYCQQHFNLPTFGGGTKVEIK

SEQ ID NO: 594 - protein, 106 aa, synthetic construct; identical to SEQ ID NO: 593
  REGION 1..106: note = source = /note="Description of Artificial Sequence: Synthetic polypeptide"

SEQ ID NO: 595 - protein, 106 aa, synthetic construct; identical to SEQ ID NO: 593
  REGION 1..106: note = source = /note="Description of Artificial Sequence: Synthetic polypeptide"

SEQ ID NO: 596 - protein, 106 aa, synthetic construct; identical to SEQ ID NO: 593
  REGION 1..106: note = source = /note="Description of Artificial Sequence: Synthetic polypeptide"

SEQ ID NO: 597 - protein, 106 aa, synthetic construct; identical to SEQ ID NO: 593
  REGION 1..106: note = source = /note="Description of Artificial Sequence: Synthetic polypeptide"

SEQ ID NO: 598 - protein, 11 aa, synthetic construct
  REGION 1..11: note = source = /note="Description of Artificial Sequence: Synthetic peptide"
GSIESGSYYWG

SEQ ID NO: 599 - protein, 11 aa, synthetic construct
  REGION 1..11: note = source = /note="Description of Artificial Sequence: Synthetic peptide"
GSIESGVYYWG

SEQ ID NO: 600 - protein, 11 aa, synthetic construct
  REGION 1..11: note = source = /note="Description of Artificial Sequence: Synthetic peptide"
GSIASGSYYWG

SEQ ID NO: 601 - protein, 11 aa, synthetic construct
  REGION 1..11: note = source = /note="Description of Artificial Sequence: Synthetic peptide"
GSIESGLYYWG

SEQ ID NO: 602 - protein, 11 aa, synthetic construct
  REGION 1..11: note = source = /note="Description of Artificial Sequence: Synthetic peptide"
GSIESGLYYWG

SEQ ID NO: 603 - protein, 16 aa, synthetic construct
  REGION 1..16: note = source = /note="Description of Artificial Sequence: Synthetic peptide"
SIYYSGGTYYNPSLKS

SEQ ID NO: 604 - protein, 16 aa, synthetic construct
  REGION 1..16: note = source = /note="Description of Artificial Sequence: Synthetic peptide"
SIYYSGSTYYNPSLKS

SEQ ID NO: 605 - protein, 16 aa, synthetic construct
  REGION 1..16: note = source = /note="Description of Artificial Sequence: Synthetic peptide"
SIYYSGQTYYNPSLKS

SEQ ID NO: 606 - protein, 16 aa, synthetic construct
  REGION 1..16: note = source = /note="Description of Artificial Sequence: Synthetic peptide"
SIYYSGSTYYNPSLKS

SEQ ID NO: 607 - protein, 16 aa, synthetic construct
  REGION 1..16: note = source = /note="Description of Artificial Sequence: Synthetic peptide"
SIYYSGSTYYNPSLKS

SEQ ID NO: 608 - protein, 15 aa, synthetic construct
  REGION 1..15: note = source = /note="Description of Artificial Sequence: Synthetic peptide"
ARDGVLTLNKRSFDI

SEQ ID NO: 609 - protein, 15 aa, synthetic construct
  REGION 1..15: note = source = /note="Description of Artificial Sequence: Synthetic peptide"
ARDGVLTLNKRSFDI

SEQ ID NO: 610 - protein, 15 aa, synthetic construct
  REGION 1..15: note = source = /note="Description of Artificial Sequence: Synthetic peptide"
ARDGVLTLNKRSFDI

SEQ ID NO: 611 - protein, 15 aa, synthetic construct
  REGION 1..15: note = source = /note="Description of Artificial Sequence: Synthetic peptide"
ARDGVLTLNKRSFDI

SEQ ID NO: 612 - protein, 15 aa, synthetic construct
  REGION 1..15: note = source = /note="Description of Artificial Sequence: Synthetic peptide"
ARDGVLALNKRSFDI

SEQ ID NO: 613 - protein, 123 aa, synthetic construct
  REGION 1..123: note = source = /note="Description of Artificial Sequence: Synthetic polypeptide"
QLQLQESGPGLVKPSETLSLTCTVSGGSIESGSYYWGWIRQPPGKGLEWIGSIYYSGGTYYNPSLKSRVTISVDTSKNQFSLKLSSVTAADTAVYYCARDGVLTLNKRSFDIWGQGTMVTVSS

SEQ ID NO: 614 - protein, 123 aa, synthetic construct
  REGION 1..123: note = source = /note="Description of Artificial Sequence: Synthetic polypeptide"
QVQLQESGPGLVKPSQTLSLTCTVSGGSIESGVYYWGWIRQPPGKGLEWIGSIYYSGSTYYNPSLKSRVTISVDTSKNQFSLKLSSVTAADTAVYYCARDGVLTLNKRSFDIWGQGTMVTVSS

SEQ ID NO: 615 - protein, 123 aa, synthetic construct
  REGION 1..123: note = source = /note="Description of Artificial Sequence: Synthetic polypeptide"
QLQLQESGPGLVKPSETLSLTCTVSGGSIASGSYYWGWIRQPPGKGLEWIGSIYYSGQTYYNPSLKSRVTISVDTSKNQFSLKLSSVTAADTAVYYCARDGVLTLNKRSFDIWGQGTMVTVSS

SEQ ID NO: 616 - protein, 123 aa, synthetic construct
  REGION 1..123: note = source = /note="Description of Artificial Sequence: Synthetic polypeptide"
QVQLQESGPGLVKPSQTLSLTCTVSGGSIESGLYYWGWIRQPPGKGLEWIGSIYYSGSTYYNPSLKSRVTISVDTSKNQFSLKLSSVTAADTAVYYCARDGVLTLNKRSFDIWGQGTMVTVSS

SEQ ID NO: 617 - protein, 123 aa, synthetic construct
  REGION 1..123: note = source = /note="Description of Artificial Sequence: Synthetic polypeptide"
QVQLQESGPGLVKPSQTLSLTCTVSGGSIESGLYYWGWIRQPPGKGLEWIGSIYYSGSTYYNPSLKSRATISVDTSKNQFSLKLSSVTAADTAVYYCARDGVLALNKRSFDIWGQGTMVTVSS

SEQ ID NO: 618 - protein, 12 aa, synthetic construct
  REGION 1..12: note = source = /note="Description of Artificial Sequence: Synthetic peptide"
RASQSVSSSYLA

SEQ ID NO: 619 - protein, 12 aa, synthetic construct
  REGION 1..12: note = source = /note="Description of Artificial Sequence: Synthetic peptide"
RASQSVSSSYLA

SEQ ID NO: 620 - protein, 12 aa, synthetic construct
  REGION 1..12: note = source = /note="Description of Artificial Sequence: Synthetic peptide"
RASQSVSSSYLA

SEQ ID NO: 621 - protein, 12 aa, synthetic construct
  REGION 1..12: note = source = /note="Description of Artificial Sequence: Synthetic peptide"
RASQSVSSSYLA

SEQ ID NO: 622 - protein, 12 aa, synthetic construct
  REGION 1..12: note = source = /note="Description of Artificial Sequence: Synthetic peptide"
RASQSVSSSYLA

SEQ ID NO: 623 - protein, 7 aa, synthetic construct
  REGION 1..7: note = source = /note="Description of Artificial Sequence: Synthetic peptide"
GASSRAT

SEQ ID NO: 624 - protein, 7 aa, synthetic construct
  REGION 1..7: note = source = /note="Description of Artificial Sequence: Synthetic peptide"
GASSRAT

SEQ ID NO: 625 - protein, 7 aa, synthetic construct
  REGION 1..7: note = source = /note="Description of Artificial Sequence: Synthetic peptide"
GASSRAT

SEQ ID NO: 626 - protein, 7 aa, synthetic construct
  REGION 1..7: note = source = /note="Description of Artificial Sequence: Synthetic peptide"
GASSRAT

SEQ ID NO: 627 - protein, 7 aa, synthetic construct
  REGION 1..7: note = source = /note="Description of Artificial Sequence: Synthetic peptide"
GASSRAT

SEQ ID NO: 628 - protein, 10 aa, synthetic construct
  REGION 1..10: note = source = /note="Description of Artificial Sequence: Synthetic peptide"
QQHTVRPPLT

SEQ ID NO: 629 - protein, 10 aa, synthetic construct
  REGION 1..10: note = source = /note="Description of Artificial Sequence: Synthetic peptide"
QQHTVRPPLT

SEQ ID NO: 630 - protein, 10 aa, synthetic construct
  REGION 1..10: note = source = /note="Description of Artificial Sequence: Synthetic peptide"
QQHTVRPPLT

SEQ ID NO: 631 - protein, 10 aa, synthetic construct
  REGION 1..10: note = source = /note="Description of Artificial Sequence: Synthetic peptide"
QQHTVRPPLT

SEQ ID NO: 632 - protein, 10 aa, synthetic construct
  REGION 1..10: note = source = /note="Description of Artificial Sequence: Synthetic peptide"
QQHTVRPPLT

SEQ ID NO: 633 - protein, 109 aa, synthetic construct
  REGION 1..109: note = source = /note="Description of Artificial Sequence: Synthetic polypeptide"
EIVLTQSPGTLSLSPGERATLSCRASQSVSSSYLAWYQQKPGQAPRLLIYGASSRATGIPDRFSGSGSGTDFTLTISRLEPEDFAVYYCQQHTVRPPLTFGGGTKVEIK

SEQ ID NO: 634 - protein, 109 aa, synthetic construct; identical to SEQ ID NO: 633
  REGION 1..109: note = source = /note="Description of Artificial Sequence: Synthetic polypeptide"

SEQ ID NO: 635 - protein, 109 aa, synthetic construct; identical to SEQ ID NO: 633
  REGION 1..109: note = source = /note="Description of Artificial Sequence: Synthetic polypeptide"

SEQ ID NO: 636 - protein, 109 aa, synthetic construct; identical to SEQ ID NO: 633
  REGION 1..109: note = source = /note="Description of Artificial Sequence: Synthetic polypeptide"

SEQ ID NO: 637 - protein, 109 aa, synthetic construct; identical to SEQ ID NO: 633
  REGION 1..109: note = source = /note="Description of Artificial Sequence: Synthetic polypeptide"

SEQ ID NO: 638 - protein, 11 aa, synthetic construct
  REGION 1..11: note = source = /note="Description of Artificial Sequence: Synthetic peptide"
GSIESGLYYWG

SEQ ID NO: 639 - protein, 11 aa, synthetic construct
  REGION 1..11: note = source = /note="Description of Artificial Sequence: Synthetic peptide"
GSIESGLYYWG

SEQ ID NO: 640 - protein, 9 aa, synthetic construct
  REGION 1..9: note = source = /note="Description of Artificial Sequence: Synthetic peptide"
YTFGNYYMH

SEQ ID NO: 641 - protein, 9 aa, synthetic construct
  REGION 1..9: note = source = /note="Description of Artificial Sequence: Synthetic peptide"
YTFPAYYMH

SEQ ID NO: 642 - protein, 9 aa, synthetic construct
  REGION 1..9: note = source = /note="Description of Artificial Sequence: Synthetic peptide"
YTFREYYMH

SEQ ID NO: 643 - protein, 16 aa, synthetic construct
  REGION 1..16: note = source = /note="Description of Artificial Sequence: Synthetic peptide"
SIYYSGSTYYNPSLKS

SEQ ID NO: 644 - protein, 16 aa, synthetic construct
  REGION 1..16: note = source = /note="Description of Artificial Sequence: Synthetic peptide"
SIYYSGSTYYNPSLKS

SEQ ID NO: 645 - protein, 17 aa, synthetic construct
  REGION 1..17: note = source = /note="Description of Artificial Sequence: Synthetic peptide"
IINPSLGLTSYAQKFQG

SEQ ID NO: 646 - protein, 17 aa, synthetic construct
  REGION 1..17: note = source = /note="Description of Artificial Sequence: Synthetic peptide"
IINPSLGLTSYAQKFQG

SEQ ID NO: 647 - protein, 17 aa, synthetic construct
  REGION 1..17: note = source = /note="Description of Artificial Sequence: Synthetic peptide"
IINPSIGLTSYARKFQG

SEQ ID NO: 648 - protein, 15 aa, synthetic construct
  REGION 1..15: note = source = /note="Description of Artificial Sequence: Synthetic peptide"
ARDGVLALNKRSFDI

SEQ ID NO: 649 - protein, 15 aa, synthetic construct
  REGION 1..15: note = source = /note="Description of Artificial Sequence: Synthetic peptide"
ARDGVLALNKRSFDI

SEQ ID NO: 650 - protein, 14 aa, synthetic construct
  REGION 1..14: note = source = /note="Description of Artificial Sequence: Synthetic peptide"
ARGGRTTWIGAFDI

SEQ ID NO: 651 - protein, 14 aa, synthetic construct
  REGION 1..14: note = source = /note="Description of Artificial Sequence: Synthetic peptide"
ARGGRTTWIGAFDI

SEQ ID NO: 652 - protein, 14 aa, synthetic construct
  REGION 1..14: note = source = /note="Description of Artificial Sequence: Synthetic peptide"
ARGGRTTWIGAFDI

SEQ ID NO: 653 - protein, 123 aa, synthetic construct
  REGION 1..123: note = source = /note="Description of Artificial Sequence: Synthetic polypeptide"
QVQLQESGPGLVKPSQTLSLTCTVSGGSIESGLYYWGWIRQPPGKGLEWIGSIYYSGSTYYNPSLKSRVTISVDTSKNQFSLKLSSVTAADTAVYYCARDGVLALNKRSFDIWGQGTMVTVSS

SEQ ID NO: 654 - protein, 123 aa, synthetic construct
  REGION 1..123: note = source = /note="Description of Artificial Sequence: Synthetic polypeptide"
QVQLQESGPGLVKPSQTLSLTCTASGGSIESGLYYWGWIRQPPGKGLEWIGSIYYSGSTYYNPSLKSRVTISVDTSKNQFSLKLSSVTAADTAVYYCARDGVLALNKRSFDIWGQGTMVTVSS

SEQ ID NO: 655 - protein, 121 aa, synthetic construct
  REGION 1..121: note = source = /note="Description of Artificial Sequence: Synthetic polypeptide"
QVQLVQSGAEVKKPGASVKVSCKASGYTFGNYYMHWVRQAPGQGLEWMGIINPSLGLTSYAQKFQGRVTMTRDTSTSTVYMELSSLRSEDTAVYYCARGGRTTWIGAFDIWGQGTMVTVSS

SEQ ID NO: 656 - protein, 121 aa, synthetic construct
  REGION 1..121: note = source = /note="Description of Artificial Sequence: Synthetic polypeptide"
QVQLVQSGAEVKKPGASVKVSCKASGYTFPAYYMHWVRQAPGQGLEWMGIINPSLGLTSYAQKFQGRVTMTRDTSTSTVYMELSSLRSEDTAVYYCARGGRTTWIGAFDIWGQGTMVTVSS

SEQ ID NO: 657 - protein, 121 aa, synthetic construct
  REGION 1..121: note = source = /note="Description of Artificial Sequence: Synthetic polypeptide"
QVQLVQSGAEVKKPGASVKVSCKASGYTFREYYMHWVRQAPGQGLEWMGIINPSIGLTSYARKFQGRVTMTRDTSTSTVYMELSSLRSEDTAVYYCARGGRTTWIGAFDIWGQGTMVTVSS

SEQ ID NO: 658 - protein, 12 aa, synthetic construct
  REGION 1..12: note = source = /note="Description of Artificial Sequence: Synthetic peptide"
RASQSVSSSYLA

SEQ ID NO: 659 - protein, 12 aa, synthetic construct
  REGION 1..12: note = source = /note="Description of Artificial Sequence: Synthetic peptide"
RASQSVSSSYLA

SEQ ID NO: 660 - protein, 11 aa, synthetic construct
  REGION 1..11: note = source = /note="Description of Artificial Sequence: Synthetic peptide"
RASQSVSSNLA

SEQ ID NO: 661 - protein, 11 aa, synthetic construct
  REGION 1..11: note = source = /note="Description of Artificial Sequence: Synthetic peptide"
RASQSVSSNLA

SEQ ID NO: 662 - protein, 11 aa, synthetic construct
  REGION 1..11: note = source = /note="Description of Artificial Sequence: Synthetic peptide"
RASQSVSSNLA

SEQ ID NO: 663 - protein, 7 aa, synthetic construct
  REGION 1..7: note = source = /note="Description of Artificial Sequence: Synthetic peptide"
GASSRAT

SEQ ID NO: 664 - protein, 7 aa, synthetic construct
  REGION 1..7: note = source = /note="Description of Artificial Sequence: Synthetic peptide"
GASSRAT

SEQ ID NO: 665 - protein, 7 aa, synthetic construct
  REGION 1..7: note = source = /note="Description of Artificial Sequence: Synthetic peptide"
GASTRAT

SEQ ID NO: 666 - protein, 7 aa, synthetic construct
  REGION 1..7: note = source = /note="Description of Artificial Sequence: Synthetic peptide"
GASTRAT

SEQ ID NO: 667 - protein, 7 aa, synthetic construct
  REGION 1..7: note = source = /note="Description of Artificial Sequence: Synthetic peptide"
GASTRAT

SEQ ID NO: 668 - protein, 10 aa, synthetic construct
  REGION 1..10: note = source = /note="Description of Artificial Sequence: Synthetic peptide"
QQHTVRPPLT

SEQ ID NO: 669 - protein, 10 aa, synthetic construct
  REGION 1..10: note = source = /note="Description of Artificial Sequence: Synthetic peptide"
QQHTVRPPLT

SEQ ID NO: 670 - protein, 10 aa, synthetic construct
  REGION 1..10: note = source = /note="Description of Artificial Sequence: Synthetic peptide"
QQYVVWPPLT

SEQ ID NO: 671 - protein, 10 aa, synthetic construct
  REGION 1..10: note = source = /note="Description of Artificial Sequence: Synthetic peptide"
QQYVVWPPLT

SEQ ID NO: 672 - protein, 10 aa, synthetic construct
  REGION 1..10: note = source = /note="Description of Artificial Sequence: Synthetic peptide"
QQYVVWPPLT

SEQ ID NO: 673 - protein, 109 aa, synthetic construct; identical to SEQ ID NO: 633
  REGION 1..109: note = source = /note="Description of Artificial Sequence: Synthetic polypeptide"

SEQ ID NO: 674 - protein, 109 aa, synthetic construct; identical to SEQ ID NO: 633
  REGION 1..109: note = source = /note="Description of Artificial Sequence: Synthetic polypeptide"

SEQ ID NO: 675 - protein, 108 aa, synthetic construct
  REGION 1..108: note = source = /note="Description of Artificial Sequence: Synthetic polypeptide"
EIVMTQSPATISVSPGERATLSCRASQSVSSNLAWYQQKPGQAPRLLIYGASTRATGIPARFSGSGSGTEFTLTISSLQSEDFAVYYCQQYVVWPPLTFGGGTKVEIK

SEQ ID NO: 676 - protein, 108 aa, synthetic construct
  REGION 1..108: note = source = /note="Description of Artificial Sequence: Synthetic polypeptide"
EIVMTQSPATLSVSPGERATLSCRASQSVSSNLAWYQQKPGQAPRLLIYGASTRATGIPARFSGSGSGTEFTLTISSLQSEDFAVYYCQQYVVWPPLTFGGGTKVEIK

SEQ ID NO: 677 - protein, 108 aa, synthetic construct; identical to SEQ ID NO: 676
  REGION 1..108: note = source = /note="Description of Artificial Sequence: Synthetic polypeptide"

SEQ ID NO: 678 - protein, 9 aa, synthetic construct
  REGION 1..9: note = source = /note="Description of Artificial Sequence: Synthetic peptide"
YTFREYYMH

SEQ ID NO: 679 - protein, 9 aa, synthetic construct
  REGION 1..9: note = source = /note="Description of Artificial Sequence: Synthetic peptide"
YTFPAYYIH

SEQ ID NO: 680 - protein, 9 aa, synthetic construct
  REGION 1..9: note = source = /note="Description of Artificial Sequence: Synthetic peptide"
YTFPAYYMH

SEQ ID NO: 681 - protein, 9 aa, synthetic construct
  REGION 1..9: note = source = /note="Description of Artificial Sequence: Synthetic peptide"
YTFTSHYMG

SEQ ID NO: 682 - protein, 9 aa, synthetic construct
  REGION 1..9: note = source = /note="Description of Artificial Sequence: Synthetic peptide"
YTFTSHYMG

SEQ ID NO: 683 - protein, 9 aa, synthetic construct
  REGION 1..9: note = source = /note="Description of Artificial Sequence: Synthetic peptide"
YTFTSHYMG

SEQ ID NO: 684 - protein, 17 aa, synthetic construct
  REGION 1..17: note = source = /note="Description of Artificial Sequence: Synthetic peptide"
IINPSIGLTSYARKFQG

SEQ ID NO: 685 - protein, 17 aa, synthetic construct
  REGION 1..17: note = source = /note="Description of Artificial Sequence: Synthetic peptide"
IINPSLGLTSYARKFQG

SEQ ID NO: 686 - protein, 17 aa, synthetic construct
  REGION 1..17: note = source = /note="Description of Artificial Sequence: Synthetic peptide"
IINPSLGLTSYARKFQG

SEQ ID NO: 687 - protein, 17 aa, synthetic construct
  REGION 1..17: note = source = /note="Description of Artificial Sequence: Synthetic peptide"
VINPSMGATSYAQKFQG

SEQ ID NO: 688 - protein, 17 aa, synthetic construct
  REGION 1..17: note = source = /note="Description of Artificial Sequence: Synthetic peptide"
IINPSMGATSYAQKFQG

SEQ ID NO: 689 - protein, 17 aa, synthetic construct
  REGION 1..17: note = source = /note="Description of Artificial Sequence: Synthetic peptide"
IINPSMGATSYTQKFRG

SEQ ID NO: 690 - protein, 14 aa, synthetic construct
  REGION 1..14: note = source = /note="Description of Artificial Sequence: Synthetic peptide"
ARGGRTTWIGALDI

SEQ ID NO: 691 - protein, 14 aa, synthetic construct
  REGION 1..14: note = source = /note="Description of Artificial Sequence: Synthetic peptide"
ARGGRTTWIGALDI

SEQ ID NO: 692 - protein, 14 aa, synthetic construct
  REGION 1..14: note = source = /note="Description of Artificial Sequence: Synthetic peptide"
ARGGRTTWIGAFDI

SEQ ID NO: 693 - protein, 16 aa, synthetic construct
  REGION 1..16: note = source = /note="Description of Artificial Sequence: Synthetic peptide"
ARLHVSGSYYPAYLDY

SEQ ID NO: 694 - protein, 16 aa, synthetic construct
  REGION 1..16: note = source = /note="Description of Artificial Sequence: Synthetic peptide"
ARLHVSGSYYPAYLDY

SEQ ID NO: 695 - protein, 16 aa, synthetic construct
  REGION 1..16: note = source = /note="Description of Artificial Sequence: Synthetic peptide"
ARLHVSGSYYPAYLDY

SEQ ID NO: 696 - protein, 121 aa, synthetic construct
  REGION 1..121: note = source = /note="Description of Artificial Sequence: Synthetic polypeptide"
QVQLVQSGAEVKKPGASVKVSCKASGYTFREYYMHWVRQAPGQGLEWMGIINPSIGLTSYARKFQGRVTMTRDTSTSTVYMELSSLRSEDTAVYYCARGGRTTWIGALDIWGQGTMVTVSS

SEQ ID NO: 697 - protein, 121 aa, synthetic construct
  REGION 1..121: note = source = /note="Description of Artificial Sequence: Synthetic polypeptide"
QVQLVQSGAEVKKPGASVKVSCKASGYTFPAYYIHWVRQAPGQGLEWMGIINPSLGLTSYARKFQGRVTMTRDTSTSTVYMELSSLRSEDTAVYYCARGGRTTWIGALDIWGQGTMVTVSS

SEQ ID NO: 698 - protein, 121 aa, synthetic construct
  REGION 1..121: note = source = /note="Description of Artificial Sequence: Synthetic polypeptide"
QVQLVQSGAEVKKPGASVKVSCKASGYTFPAYYMHWVRQAPGQGLEWMGIINPSLGLTSYARKFQGRVTMTRDTSTSTVYMELSSLRSEDTAVYYCARGGRTTWIGAFDIWGQGTMVTVSS

SEQ ID NO: 699 - protein, 124 aa, synthetic construct
  REGION 1..124: note = source = /note="Description of Artificial Sequence: Synthetic polypeptide"
QVQLVQSGAEVKKPGASVKVSCKASGYTFTSHYMGWVRQAPGQGLEWMGVINPSMGATSYAQKFQGRVTMTRDTSTLSTVYMELSSLRSEDTAVYYCARLHVSGSYYPAYLDYWGQGTMVTVSS

SEQ ID NO: 700 - protein, 123 aa, synthetic construct
  REGION 1..123: note = source = /note="Description of Artificial Sequence: Synthetic polypeptide"
QVQLVQSGAEVKKPGASVKVSCKASGYTFTSHYMGWVRQAPGQGLEWVGIINPSMGATSYAQKFQGRVTMTRDTSTSTVYMELSSLASEDTAVYYCARLHVSGSYYPAYLDYWGQGTMVTVSS

SEQ ID NO: 701 - protein, 123 aa, synthetic construct
  REGION 1..123: note = source = /note="Description of Artificial Sequence: Synthetic polypeptide"
QVQLVQSGAEVKKPGASVKVSCKASGYTFTSHYMGWVRQAPGQGLEWMGIINPSMGATSYTQKFRGRVTMTRDTSTSTVYMELSSLASEDTAVYYCARLHVSGSYYPAYLDYWGQGTMVTVSS

SEQ ID NO: 702 - protein, 11 aa, synthetic construct
  REGION 1..11: note = source = /note="Description of Artificial Sequence: Synthetic peptide"
RASQSVSSNLA

SEQ ID NO: 703 - protein, 11 aa, synthetic construct
  REGION 1..11: note = source = /note="Description of Artificial Sequence: Synthetic peptide"
RASQSVSSNLA

SEQ ID NO: 704 - protein, 11 aa, synthetic construct
  REGION 1..11: note = source = /note="Description of Artificial Sequence: Synthetic peptide"
RASQSVSSNLA

SEQ ID NO: 705 - protein, 11 aa, synthetic construct
  REGION 1..11: note = source = /note="Description of Artificial Sequence: Synthetic peptide"
RASQSVSSNLA

SEQ ID NO: 706 - protein, 11 aa, synthetic construct
  REGION 1..11: note = source = /note="Description of Artificial Sequence: Synthetic peptide"
RASQSVSSNLA

SEQ ID NO: 707 - protein, 11 aa, synthetic construct
  REGION 1..11: note = source = /note="Description of Artificial Sequence: Synthetic peptide"
RASQSVSSNLA

SEQ ID NO: 708 - protein, 7 aa, synthetic construct
  REGION 1..7: note = source = /note="Description of Artificial Sequence: Synthetic peptide"
GASTRAT

SEQ ID NO: 709 - protein, 7 aa, synthetic construct
  REGION 1..7: note = source = /note="Description of Artificial Sequence: Synthetic peptide"
GASTRAT

SEQ ID NO: 710 - protein, 7 aa, synthetic construct
  REGION 1..7: note = source = /note="Description of Artificial Sequence: Synthetic peptide"
GASTRAT

SEQ ID NO: 711 - protein, 7 aa, synthetic construct
  REGION 1..7: note = source = /note="Description of Artificial Sequence: Synthetic peptide"
GASTRAT

SEQ ID NO: 712 - protein, 7 aa, synthetic construct
  REGION 1..7: note = source = /note="Description of Artificial Sequence: Synthetic peptide"
GASTRAT

SEQ ID NO: 713 - protein, 7 aa, synthetic construct
  REGION 1..7: note = source = /note="Description of Artificial Sequence: Synthetic peptide"
GASTRAT

SEQ ID NO: 714 - protein, 10 aa, synthetic construct
  REGION 1..10: note = source = /note="Description of Artificial Sequence: Synthetic peptide"
QQYVVWPPLT

SEQ ID NO: 715 - protein, 10 aa, synthetic construct
  REGION 1..10: note = source = /note="Description of Artificial Sequence: Synthetic peptide"
QQYVVWPPLT

SEQ ID NO: 716 - protein, 10 aa, synthetic construct
  REGION 1..10: note = source = /note="Description of Artificial Sequence: Synthetic peptide"
QQYVVWPPLT

SEQ ID NO: 717 - protein, 9 aa, synthetic construct
  REGION 1..9: note = source = /note="Description of Artificial Sequence: Synthetic peptide"
QQYIVFPWT

SEQ ID NO: 718 - protein, 9 aa, synthetic construct
  REGION 1..9: note = source = /note="Description of Artificial Sequence: Synthetic peptide"
QQYIVFPWT

SEQ ID NO: 719 - protein, 9 aa, synthetic construct
  REGION 1..9: note = source = /note="Description of Artificial Sequence: Synthetic peptide"
QQYIVFPWT

SEQ ID NO: 720 - protein, 108 aa, synthetic construct; identical to SEQ ID NO: 676
  REGION 1..108: note = source = /note="Description of Artificial Sequence: Synthetic polypeptide"

SEQ ID NO: 721 - protein, 108 aa, synthetic construct; identical to SEQ ID NO: 676
  REGION 1..108: note = source = /note="Description of Artificial Sequence: Synthetic polypeptide"

SEQ ID NO: 722 - protein, 108 aa, synthetic construct; identical to SEQ ID NO: 676
  REGION 1..108: note = source = /note="Description of Artificial Sequence: Synthetic polypeptide"

SEQ ID NO: 723 - protein, 107 aa, synthetic construct
  REGION 1..107: note = source = /note="Description of Artificial Sequence: Synthetic polypeptide"
EIVMTQSPATLSVSPGERATLSCRASQSVSSNLAWYQQKPGQAPRHLIYGASTRATGIPARFSGSGSGTEFTLTISSLQSEDFAVYYCQQYIVFPWTFGGGTKVEIK

SEQ ID NO: 724 - protein, 107 aa, synthetic construct; identical to SEQ ID NO: 723
  REGION 1..107: note = source = /note="Description of Artificial Sequence: Synthetic polypeptide"

SEQ ID NO: 725 - protein, 107 aa, synthetic construct; identical to SEQ ID NO: 723
  REGION 1..107: note = source = /note="Description of Artificial Sequence: Synthetic polypeptide"

SEQ ID NO: 726 - protein, 127 aa, synthetic construct
  REGION 1..127: note = source = /note="Description of Artificial Sequence: Synthetic polypeptide"
EVQLQESGPGLVKPSQSLSLTCSVTGSSIASDYWGWIRKFPGNKMEWMGFITYSGSTSYNPSLKSRISITRDTSKNQFFLQLHSVTTDDTATYSCARMPSFITLASLSTWEGYFDFWGPGTMVTVSS

SEQ ID NO: 727 - protein, 5 aa, synthetic construct
  REGION 1..5: note = source = /note="Description of Artificial Sequence: Synthetic peptide"
SDYWG

SEQ ID NO: 728 - protein, 16 aa, synthetic construct
  REGION 1..16: note = source = /note="Description of Artificial Sequence: Synthetic peptide"
FITYSGSTSYNPSLKS

SEQ ID NO: 729 - protein, 19 aa, synthetic construct
  REGION 1..19: note = source = /note="Description of Artificial Sequence: Synthetic peptide"
MPSFITLASLSTWEGYFDF

SEQ ID NO: 730 - protein, 106 aa, synthetic construct
  REGION 1..106: note = source = /note="Description of Artificial Sequence: Synthetic polypeptide"
DIQMTQSPSLLSASVGDRVTLNCKASQSIHKNLAWYQQKLGEAPKFLIYYANSLQTGIPSRFSGSGSGTDFTLTISGLQPEDVATYFCQQYYSGWTFGGGTKVELK

SEQ ID NO: 731 - protein, 11 aa, synthetic construct
  REGION 1..11: note = source = /note="Description of Artificial Sequence: Synthetic peptide"
KASQSIHKNLA

SEQ ID NO: 732 - protein, 7 aa, synthetic construct
  REGION 1..7: note = source = /note="Description of Artificial Sequence: Synthetic peptide"
YANSLQT

SEQ ID NO: 733 - protein, 8 aa, synthetic construct
  REGION 1..8: note = source = /note="Description of Artificial Sequence: Synthetic peptide"
QQYYSGWT

SEQ ID NO: 734 - protein, 127 aa, synthetic construct
  REGION 1..127: note = source = /note="Description of Artificial Sequence: Synthetic polypeptide"
EVQLQESGPGLVKPSETLSLTCTVSGGSISSDYWGWIRQPPGKGLEWIGFITYSGSTSYNPSLKSRVTISVDTSKNQFSLKLSSVTAADTAVYYCARMPSFITLASLSTWEGYFDFWGQGTMVTVSS

SEQ ID NO: 735 - protein, 4 aa, synthetic construct
  REGION 1..4: note = source = /note="Description of Artificial Sequence: Synthetic peptide"
DYWG

SEQ ID NO: 736 - protein, 16 aa, synthetic construct
  REGION 1..16: note = source = /note="Description of Artificial Sequence: Synthetic peptide"
FITYSGSTSYNPSLKS

SEQ ID NO: 737 - protein, 19 aa, synthetic construct
  REGION 1..19: note = source = /note="Description of Artificial Sequence: Synthetic peptide"
MPSFITLASLSTWEGYFDF

SEQ ID NO: 738 - protein, 127 aa, synthetic construct
  REGION 1..127: note = source = /note="Description of Artificial Sequence: Synthetic polypeptide"
EVQLQESGPGLVKPSETLSLTCTVSGGSISSDYWGWIRQPPGKGLEWIGFITYSGSTSYNPSLKSRVTISRDTSKNQFSLKLSSVTAADTAVYYCARMPSFITLASLSTWEGYFDFWGQGTMVTVSS

SEQ ID NO: 739 - protein, 5 aa, synthetic construct
  REGION 1..5: note = source = /note="Description of Artificial Sequence: Synthetic peptide"
SDYWG

SEQ ID NO: 740 - protein, 16 aa, synthetic construct
  REGION 1..16: note = source = /note="Description of Artificial Sequence: Synthetic peptide"
FITYSGSTSYNPSLKS

SEQ ID NO: 741 - protein, 19 aa, synthetic construct
  REGION 1..19: note = source = /note="Description of Artificial Sequence: Synthetic peptide"
MPSFITLASLSTWEGYFDF

SEQ ID NO: 742 - protein, 127 aa, synthetic construct
  REGION 1..127: note = source = /note="Description of Artificial Sequence: Synthetic polypeptide"
EVQLQESGPGLVKPSETLSLTCTVSGGSISSDYWGWIRQPPGKGLEWIGFITYSGSTSYNPSLKSRITISRDTSKNQFSLKLSSVTAADTAVYYCARMPSFITLASLSTWEGYFDFWGQGTMVTVSS

SEQ ID NO: 743 - protein, 5 aa, synthetic construct
  REGION 1..5: note = source = /note="Description of Artificial Sequence: Synthetic peptide"
SDYWG

SEQ ID NO: 744 - protein, 16 aa, synthetic construct
  REGION 1..16: note = source = /note="Description of Artificial Sequence: Synthetic peptide"
FITYSGSTSYNPSLKS

SEQ ID NO: 745 - protein, 19 aa, synthetic construct
  REGION 1..19: note = source = /note="Description of Artificial Sequence: Synthetic peptide"
MPSFITLASLSTWEGYFDF

SEQ ID NO: 746 - protein, 127 aa, synthetic construct
  REGION 1..127: note = source = /note="Description of Artificial Sequence: Synthetic polypeptide"
EVQLQESGPGLVKPSETLSLTCTVSGSSISSDYWGWIRQPPGKGLEWMGFITYSGSTSYNPSLKSRITISRDTSKNQFSLKLSSVTAADTAVYYCARMPSFITLASLSTWEGYFDFWGQGTMVTVSS

SEQ ID NO: 747 - protein, 5 aa, synthetic construct
  REGION 1..5: note = source = /note="Description of Artificial Sequence: Synthetic peptide"
SDYWG

SEQ ID NO: 748 - protein, 16 aa, synthetic construct
  REGION 1..16: note = source = /note="Description of Artificial Sequence: Synthetic peptide"
FITYSGSTSYNPSLKS

SEQ ID NO: 749 - protein, 19 aa, synthetic construct
  REGION 1..19: note = source = /note="Description of Artificial Sequence: Synthetic peptide"
MPSFITLASLSTWEGYFDF

SEQ ID NO: 750 - protein, 127 aa, synthetic construct
  REGION 1..127: note = source = /note="Description of Artificial Sequence: Synthetic polypeptide"
EVQLQESGPGLVKPSETLSLTCTVSGGSISSDYWGWIRQPPGKGLEWIGFITYSGSTSYNPSLKSRVTISRDTSKNQFSLKLHSVTAADTAVYYCARMPSFITLASLSTWEGYFDFWGQGTMVTVSS

SEQ ID NO: 751 - protein, 5 aa, synthetic construct
  REGION 1..5: note = source = /note="Description of Artificial Sequence: Synthetic peptide"
SDYWG

SEQ ID NO: 752 - protein, 16 aa, synthetic construct
  REGION 1..16: note = source = /note="Description of Artificial Sequence: Synthetic peptide"
FITYSGSTSYNPSLKS

SEQ ID NO: 753 - protein, 19 aa, synthetic construct
  REGION 1..19: note = source = /note="Description of Artificial Sequence: Synthetic peptide"
MPSFITLASLSTWEGYFDF

SEQ ID NO: 754 - protein, 127 aa, synthetic construct
  REGION 1..127: note = source = /note="Description of Artificial Sequence: Synthetic polypeptide"
EVQLQESGPGLVKPSETLSLTCTVSGGSISSDYWGWIRQPPGKGLEWIGFITYSGSTSYNPSLKSRITISRDTSKNQFSLKLHSVTAADTAVYYCARMPSFITLASLSTWEGYFDFWGQGTMVTVSS

SEQ ID NO: 755 - protein, 5 aa, synthetic construct
  REGION 1..5: note = source = /note="Description of Artificial Sequence: Synthetic peptide"
SDYWG

SEQ ID NO: 756 - protein, 17 aa, synthetic construct
  REGION 1..17: note = source = /note="Description of Artificial Sequence: Synthetic peptide"
GFITYSGSTSYNPSLKS

SEQ ID NO: 757 - protein, 19 aa, synthetic construct
  REGION 1..19: note = source = /note="Description of Artificial Sequence: Synthetic peptide"
MPSFITLASLSTWEGYFDF

SEQ ID NO: 758 - protein, 127 aa, synthetic construct
  REGION 1..127: note = source = /note="Description of Artificial Sequence: Synthetic polypeptide"
EVQLQESGPGLVKPSETLSLTCTVSGSSISSDYWGWIRQPPGKGLEWIGFITYSGSTSYNPSLKSRITISRDTSKNQFSLKLHSVTAADTAVYYCARMPSFITLASLSTWEGYFDFWGQGTMVTVSS

SEQ ID NO: 759 - protein, 5 aa, synthetic construct
  REGION 1..5: note = source = /note="Description of Artificial Sequence: Synthetic peptide"
SDYWG

SEQ ID NO: 760 - protein, 16 aa, synthetic construct
  REGION 1..16: note = source = /note="Description of Artificial Sequence: Synthetic peptide"
FITYSGSTSYNPSLKS

SEQ ID NO: 761 - protein, 19 aa, synthetic construct
  REGION 1..19: note = source = /note="Description of Artificial Sequence: Synthetic peptide"
MPSFITLASLSTWEGYFDF

SEQ ID NO: 762 - protein, 127 aa, synthetic construct
  REGION 1..127: note = source = /note="Description of Artificial Sequence: Synthetic polypeptide"
EVQLQESGPGLVKPSETLSLTCTVSGSSISSDYWGWIRQPPGKGLEWMGFITYSGSTSYNPSLKSRITISVDTSKNQFSLKLHSVTAADTAVYYCARMPSFITLASLSTWEGYFDFWGQGTMVTVSS

SEQ ID NO: 763 - protein, 5 aa, synthetic construct
  REGION 1..5: note = source = /note="Description of Artificial Sequence: Synthetic peptide"
SDYWG

SEQ ID NO: 764 - protein, 16 aa, synthetic construct
  REGION 1..16: note = source = /note="Description of Artificial Sequence: Synthetic peptide"
FITYSGSTSYNPSLKS

SEQ ID NO: 765 - protein, 19 aa, synthetic construct
  REGION 1..19: note = source = /note="Description of Artificial Sequence: Synthetic peptide"
MPSFITLASLSTWEGYFDF

SEQ ID NO: 766 - protein, 127 aa, synthetic construct
  REGION 1..127: note = source = /note="Description of Artificial Sequence: Synthetic polypeptide"
EVQLQESGPGLVKPSETLSLTCAVSGYSISSDYWGWIRQPPGKGLEWIGFITYSGSTSYNPSLKSRVTISVDTSKNQFSLKLSSVTAADTAVYYCARMPSFITLASLSTWEGYFDFWGQGTMVTVSS

SEQ ID NO: 767 - protein, 5 aa, synthetic construct
  REGION 1..5: note = source = /note="Description of Artificial Sequence: Synthetic peptide"
SDYWG

SEQ ID NO: 768 - protein, 16 aa, synthetic construct
  REGION 1..16: note = source = /note="Description of Artificial Sequence: Synthetic peptide"
FITYSGSTSYNPSLKS

SEQ ID NO: 769 - protein, 19 aa, synthetic construct
  REGION 1..19: note = source = /note="Description of Artificial Sequence: Synthetic peptide"
MPSFITLASLSTWEGYFDF

SEQ ID NO: 770 - protein, 127 aa, synthetic construct
  REGION 1..127: note = source = /note="Description of Artificial Sequence: Synthetic polypeptide"
EVQLQESGPGLVKPSETLSLTCAVSGYSISSDYWGWIRQPPGKGLEWIGFITYSGSTSYNPSLKSRVTISRDTSKNQFSLKLSSVTAADTAVYYCARMPSFITLASLSTWEGYFDFWGQGTMVTVSS

SEQ ID NO: 771 - protein, 5 aa, synthetic construct
  REGION 1..5: note = source = /note="Description of Artificial Sequence: Synthetic peptide"
SDYWG

SEQ ID NO: 772 - protein, 16 aa, synthetic construct
  REGION 1..16: note = source = /note="Description of Artificial Sequence: Synthetic peptide"
FITYSGSTSYNPSLKS

SEQ ID NO: 773 - protein, 19 aa, synthetic construct
  REGION 1..19: note = source = /note="Description of Artificial Sequence: Synthetic peptide"
MPSFITLASLSTWEGYFDF

SEQ ID NO: 774 - protein, 127 aa, synthetic construct
  REGION 1..127: note = source = /note="Description of Artificial Sequence: Synthetic polypeptide"
EVQLQESGPGLVKPSETLSLTCAVSGYSISSDYWGWIRQPPGKGLEWIGFITYSGSTSYNPSLKSRITISRDTSKNQFSLKLSSVTAADTAVYYCARMPSFITLASLSTWEGYFDFWGQGTMVTVSS

SEQ ID NO: 775 - protein, 5 aa, synthetic construct
  REGION 1..5: note = source = /note="Description of Artificial Sequence: Synthetic peptide"
SDYWG

SEQ ID NO: 776 - protein, 16 aa, synthetic construct
  REGION 1..16: note = source = /note="Description of Artificial Sequence: Synthetic peptide"
FITYSGSTSYNPSLKS

SEQ ID NO: 777 - protein, 19 aa, synthetic construct
  REGION 1..19: note = source = /note="Description of Artificial Sequence: Synthetic peptide"
MPSFITLASLSTWEGYFDF

SEQ ID NO: 778 - protein, 127 aa, synthetic construct
  REGION 1..127: note = source = /note="Description of Artificial Sequence: Synthetic polypeptide"
EVQLQESGPGLVKPSETLSLTCAVSGSSISSDYWGWIRQPPGKGLEWMGFITYSGSTSYNPSLKSRITISRDTSKNQFSLKLSSVTAADTAVYYCARMPSFITLASLSTWEGYFDFWGQGTMVTVSS

SEQ ID NO: 779 - protein, 5 aa, synthetic construct
  REGION 1..5: note = source = /note="Description of Artificial Sequence: Synthetic peptide"
SDYWG

SEQ ID NO: 780 - protein, 16 aa, synthetic construct
  REGION 1..16: note = source = /note="Description of Artificial Sequence: Synthetic peptide"
FITYSGSTSYNPSLKS

SEQ ID NO: 781 - protein, 19 aa, synthetic construct
  REGION 1..19: note = source = /note="Description of Artificial Sequence: Synthetic peptide"
MPSFITLASLSTWEGYFDF

SEQ ID NO: 782 - protein, 127 aa, synthetic construct
  REGION 1..127: note = source = /note="Description of Artificial Sequence: Synthetic polypeptide"
EVQLQESGPGLVKPSETLSLTCAVSGYSISSDYWGWIRQPPGKGLEWIGFITYSGSTSYNPSLKSRVTISRDTSKNQFSLKLHSVTAADTAVYYCARMPSFITLASLSTWEGYFDFWGQGTMVTVSS

SEQ ID NO: 783 - protein, 5 aa, synthetic construct
  REGION 1..5: note = source = /note="Description of Artificial Sequence: Synthetic peptide"
SDYWG

SEQ ID NO: 784 - protein, 16 aa, synthetic construct
  REGION 1..16: note = source = /note="Description of Artificial Sequence: Synthetic peptide"
FITYSGSTSYNPSLKS

SEQ ID NO: 785 - protein, 19 aa, synthetic construct
  REGION 1..19: note = source = /note="Description of Artificial Sequence: Synthetic peptide"
MPSFITLASLSTWEGYFDF

SEQ ID NO: 786 - protein, 127 aa, synthetic construct
  REGION 1..127: note = source = /note="Description of Artificial Sequence: Synthetic polypeptide"
EVQLQESGPGLVKPSETLSLTCAVSGYSISSDYWGWIRQPPGKGLEWIGFITYSGSTSYNPSLKSRITISRDTSKNQFSLKLHSVTAADTAVYYCARMPSFITLASLSTWEGYFDFWGQGTMVTVSS

SEQ ID NO: 787 - protein, 5 aa, synthetic construct
  REGION 1..5: note = source = /note="Description of Artificial Sequence: Synthetic peptide"
SDYWG

SEQ ID NO: 788 - protein, 16 aa, synthetic construct
  REGION 1..16: note = source = /note="Description of Artificial Sequence: Synthetic peptide"
FITYSGSTSYNPSLKS

SEQ ID NO: 789 - protein, 19 aa, synthetic construct
  REGION 1..19: note = source = /note="Description of Artificial Sequence: Synthetic peptide"
MPSFITLASLSTWEGYFDF

SEQ ID NO: 790 - protein, 129 aa, synthetic construct
  REGION 1..129: note = source = /note="Description of Artificial Sequence: Synthetic polypeptide"
EVQLQESGPGLVKPSETLSLTCTVSGSSIASDYWGWIRQPPGKGLEWIGFITYSGSTSYNPSLKSRVTISVDTSKNQFSLKLSSVTAADTAVYYCARMPSFITLASLSTWEGYFDFWGQGTMVTVSSAS

SEQ ID NO: 791 - protein, 5 aa, synthetic construct
  REGION 1..5: note = source = /note="Description of Artificial Sequence: Synthetic peptide"
SDYWG

SEQ ID NO: 792 - protein, 16 aa, synthetic construct
  REGION 1..16: note = source = /note="Description of Artificial Sequence: Synthetic peptide"
FITYSGSTSYNPSLKS

SEQ ID NO: 793 - protein, 19 aa, synthetic construct
  REGION 1..19: note = source = /note="Description of Artificial Sequence: Synthetic peptide"
MPSFITLASLSTWEGYFDF

SEQ ID NO: 794 - protein, 127 aa, synthetic construct
  REGION 1..127: note = source = /note="Description of Artificial Sequence: Synthetic polypeptide"
EVQLQESGPGLVKPSETLSLTCTVSGSSIASDYWGWIRQPPGKGLEWIGFITYSGSTSYNPSLKSRVTISRDTSKNQFSLKLSSVTAADTAVYYCARMPSFITLASLSTWEGYFDFWGQGTMVTVSS

SEQ ID NO: 795 - protein, 5 aa, synthetic construct
  REGION 1..5: note = source = /note="Description of Artificial Sequence: Synthetic peptide"
SDYWG

SEQ ID NO: 796 - protein, 16 aa, synthetic construct
  REGION 1..16: note = source = /note="Description of Artificial Sequence: Synthetic peptide"
FITYSGSTSYNPSLKS

SEQ ID NO: 797 - protein, 19 aa, synthetic construct
  REGION 1..19: note = source = /note="Description of Artificial Sequence: Synthetic peptide"
MPSFITLASLSTWEGYFDF

SEQ ID NO: 798 - protein, 127 aa, synthetic construct
  REGION 1..127: note = source = /note="Description of Artificial Sequence: Synthetic polypeptide"
EVQLQESGPGLVKPSETLSLTCTVSGSSIASDYWGWIRKPPGKGLEWIGFITYSGSTSYNPSLKSRVTISRDTSKNQFSLKLSSVTAADTAVYYCARMPSFITLASLSTWEGYFDFWGQGTMVTVSS

SEQ ID NO: 799 - protein, 5 aa, synthetic construct
  REGION 1..5: note = source = /note="Description of Artificial Sequence: Synthetic peptide"
SDYWG

SEQ ID NO: 800 - protein, 16 aa, synthetic construct
  REGION 1..16: note = source = /note="Description of Artificial Sequence: Synthetic peptide"
FITYSGSTSYNPSLKS

SEQ ID NO: 801 - protein, 19 aa, synthetic construct
  REGION 1..19: note = source = /note="Description of Artificial Sequence: Synthetic peptide"
MPSFITLASLSTWEGYFDF

SEQ ID NO: 802 - protein, 127 aa, synthetic construct
  REGION 1..127: note = source = /note="Description of Artificial Sequence: Synthetic polypeptide"
EVQLQESGPGLVKPSETLSLTCTVSGSSIASDYWGWIRQPPGKKLEWIGFITYSGSTSYNPSLKSRVTISRDTSKNQFSLKLSSVTAADTAVYYCARMPSFITLASLSTWEGYFDFWGQGTMVTVSS

SEQ ID NO: 803 - protein, 5 aa, synthetic construct
  REGION 1..5: note = source = /note="Description of Artificial Sequence: Synthetic peptide"
SDYWG

SEQ ID NO: 804 - protein, 16 aa, synthetic construct
  REGION 1..16: note = source = /note="Description of Artificial Sequence: Synthetic peptide"
FITYSGSTSYNPSLKS

SEQ ID NO: 805 - protein, 19 aa, synthetic construct
  REGION 1..19: note = source = /note="Description of Artificial Sequence: Synthetic peptide"
MPSFITLASLSTWEGYFDF

SEQ ID NO: 806 - protein, 127 aa, synthetic construct
  REGION 1..127: note = source = /note="Description of Artificial Sequence: Synthetic polypeptide"
EVQLQESGPGLVKPSETLSLTCTVSGSSIASDYWGWIRQPPGKGMEWIGFITYSGSTSYNPSLKSRVTISRDTSKNQFSLKLSSVTAADTAVYYCARMPSFITLASLSTWEGYFDFWGQGTMVTVSS

SEQ ID NO: 807 - protein, 5 aa, synthetic construct
  REGION 1..5: note = source = /note="Description of Artificial Sequence: Synthetic peptide"
SDYWG

SEQ ID NO: 808 - protein, 16 aa, synthetic construct
  REGION 1..16: note = source = /note="Description of Artificial Sequence: Synthetic peptide"
FITYSGSTSYNPSLKS

SEQ ID NO: 809 - protein, 19 aa, synthetic construct
  REGION 1..19: note = source = /note="Description of Artificial Sequence: Synthetic peptide"
MPSFITLASLSTWEGYFDF

SEQ ID NO: 810 - protein, 127 aa, synthetic construct
  REGION 1..127: note = source = /note="Description of Artificial Sequence: Synthetic polypeptide"
EVQLQESGPGLVKPSETLSLTCTVSGSSIASDYWGWIRKPPGKKMEWIGFITYSGSTSYNPSLKSRVTISRDTSKNQFSLKLSSVTAADTAVYYCARMPSFITLASLSTWEGYFDFWGQGTMVTVSS

SEQ ID NO: 811 - protein, 5 aa, synthetic construct
  REGION 1..5: note = source = /note="Description of Artificial Sequence: Synthetic peptide"
SDYWG

SEQ ID NO: 812 - protein, 16 aa, synthetic construct
  REGION 1..16: note = source = /note="Description of Artificial Sequence: Synthetic peptide"
FITYSGSTSYNPSLKS

SEQ ID NO: 813 - protein, 19 aa, synthetic construct
  REGION 1..19: note = source = /note="Description of Artificial Sequence: Synthetic peptide"
MPSFITLASLSTWEGYFDF

SEQ ID NO: 814 - protein, 127 aa, synthetic construct
  REGION 1..127: note = source = /note="Description of Artificial Sequence: Synthetic polypeptide"
EVQLQESGPGLVKPSETLSLTCTVSGSSIASDYWGWIRQFPGKGLEWIGFITYSGSTSYNPSLKSRVTISRDTSKNQFSLKLSSVTADDTAVYYCARMPSFITLASLSTWEGYFDFWGQGTMVTVSS

SEQ ID NO: 815 - protein, 5 aa, synthetic construct
  REGION 1..5: note = source = /note="Description of Artificial Sequence: Synthetic peptide"
SDYWG

SEQ ID NO: 816 - protein, 16 aa, synthetic construct
  REGION 1..16: note = source = /note="Description of Artificial Sequence: Synthetic peptide"
FITYSGSTSYNPSLKS

SEQ ID NO: 817 - protein, 19 aa, synthetic construct
  REGION 1..19: note = source = /note="Description of Artificial Sequence: Synthetic peptide"
MPSFITLASLSTWEGYFDF

SEQ ID NO: 818 - protein, 127 aa, synthetic construct
  REGION 1..127: note = source = /note="Description of Artificial Sequence: Synthetic polypeptide"
EVQLQESGPGLVKPSETLSLTCTVSGSSIASDYWGWIRKPPGKKMEWIGFITYSGSTSYNPSLKSRVTISVDTSKNQFSLKLSSVTAADTAVYYCARMPSFITLASLSTWEGYFDFWGQGTMVTVSS

SEQ ID NO: 819 - protein, 5 aa, synthetic construct
  REGION 1..5: note = source = /note="Description of Artificial Sequence: Synthetic peptide"
SDYWG

SEQ ID NO: 820 - protein, 16 aa, synthetic construct
  REGION 1..16: note = source = /note="Description of Artificial Sequence: Synthetic peptide"
FITYSGSTSYNPSLKS

SEQ ID NO: 821 - protein, 19 aa, synthetic construct
  REGION 1..19: note = source = /note="Description of Artificial Sequence: Synthetic peptide"
MPSFITLASLSTWEGYFDF

SEQ ID NO: 822 - protein, 127 aa, synthetic construct
  REGION 1..127: note = source = /note="Description of Artificial Sequence: Synthetic polypeptide"
EVQLQESGPGLVKPSETLSLTCSVTGSSIASDYWGWIRQPPGKGLEWIGFITYSGSTSYNPSLKSRVTISRDTSKNQFSLKLSSVTAADTAVYYCARMPSFITLASLSTWEGYFDFWGQGTMVTVSS

SEQ ID NO: 823 - protein, 5 aa, synthetic construct
  REGION 1..5: note = source = /note="Description of Artificial Sequence: Synthetic peptide"
SDYWG

SEQ ID NO: 824 - protein, 16 aa, synthetic construct
  REGION 1..16: note = source = /note="Description of Artificial Sequence: Synthetic peptide"
FITYSGSTSYNPSLKS

SEQ ID NO: 825 - protein, 19 aa, synthetic construct
  REGION 1..19: note = source = /note="Description of Artificial Sequence: Synthetic peptide"
MPSFITLASLSTWEGYFDF

SEQ ID NO: 826 - protein, 127 aa, synthetic construct
  REGION 1..127: note = source = /note="Description of Artificial Sequence: Synthetic polypeptide"
EVQLQQSGAGLLKPSETLSLTCSVTGSSIASDYWGWIRQPPGKGLEWIGFITYSGSTSYNPSLKSRVTISVDTSKNQFSLKLSSVTAADTAVYYCARMPSFITLASLSTWEGYFDFWGQGTMVTVSS

SEQ ID NO: 827 - protein, 5 aa, synthetic construct
  REGION 1..5: note = source = /note="Description of Artificial Sequence: Synthetic peptide"
SDYWG

SEQ ID NO: 828 - protein, 16 aa, synthetic construct
  REGION 1..16: note = source = /note="Description of Artificial Sequence: Synthetic peptide"
FITYSGSTSYNPSLKS

SEQ ID NO: 829 - protein, 19 aa, synthetic construct
  REGION 1..19: note = source = /note="Description of Artificial Sequence: Synthetic peptide"
MPSFITLASLSTWEGYFDF

SEQ ID NO: 830 - protein, 127 aa, synthetic construct
  REGION 1..127: note = source = /note="Description of Artificial Sequence: Synthetic polypeptide"
EVQLQESGPGLVKPPGTLSLTCSVTGSSIASDYWGWVRQPPGKGLEWIGFITYSGSTSYNPSLKSRVTISVDTSKNQFSLKLSSVTAADTAVYYCARMPSFITLASLSTWEGYFDFWGQGTMVTVSS

SEQ ID NO: 831 - protein, 5 aa, synthetic construct
  REGION 1..5: note = source = /note="Description of Artificial Sequence: Synthetic peptide"
SDYWG

SEQ ID NO: 832 - protein, 16 aa, synthetic construct
  REGION 1..16: note = source = /note="Description of Artificial Sequence: Synthetic peptide"
FITYSGSTSYNPSLKS

SEQ ID NO: 833 - protein, 19 aa, synthetic construct
  REGION 1..19: note = source = /note="Description of Artificial Sequence: Synthetic peptide"
MPSFITLASLSTWEGYFDF

SEQ ID NO: 834 - protein, 127 aa, synthetic construct
  REGION 1..127: note = source = /note="Description of Artificial Sequence: Synthetic polypeptide"
EVQLQESGPGLVKPSETLSLTCAVSGSSISSDYWGWIRQPPGKGLEWIGFITYSGSTSYNPSLKSRITISRDTSKNQFSLKLHSVTAADTAVYYCARMPSFITLASLSTWEGYFDFWGQGTMVTVSS

SEQ ID NO: 835 - protein, 5 aa, synthetic construct
  REGION 1..5: note = source = /note="Description of Artificial Sequence: Synthetic peptide"
SDYWG

SEQ ID NO: 836 - protein, 16 aa, synthetic construct
  REGION 1..16: note = source = /note="Description of Artificial Sequence: Synthetic peptide"
FITYSGSTSYNPSLKS

SEQ ID NO: 837 - protein, 19 aa, synthetic construct
  REGION 1..19: note = source = /note="Description of Artificial Sequence: Synthetic peptide"
MPSFITLASLSTWEGYFDF

SEQ ID NO: 838 - protein, 127 aa, synthetic construct
  REGION 1..127: note = source = /note="Description of Artificial Sequence: Synthetic polypeptide"
EVQLQESGPGLVKPSETLSLTCAVSGSSISSDYWGWIRQPPGKGLEWMGFITYSGSTSYNPSLKSRITISRDTSKNQFSLKLHSVTAADTAVYYCARMPSFITLASLSTWEGYFDFWGQGTMVTVSS

SEQ ID NO: 839 - protein, 5 aa, synthetic construct
  REGION 1..5: note = source = /note="Description of Artificial Sequence: Synthetic peptide"
SDYWG

SEQ ID NO: 840 - protein, 16 aa, synthetic construct
  REGION 1..16: note = source = /note="Description of Artificial Sequence: Synthetic peptide"
FITYSGSTSYNPSLKS

SEQ ID NO: 841 - protein, 19 aa, synthetic construct
  REGION 1..19: note = source = /note="Description of Artificial Sequence: Synthetic peptide"
MPSFITLASLSTWEGYFDF

SEQ ID NO: 842 - protein, 106 aa, synthetic construct
  REGION 1..106: note = source = /note="Description of Artificial Sequence: Synthetic polypeptide"
DIQMTQSPSSLSASVGDRVTITCKASQSIHKNLAWYQQKPGKAPKLLIYYANSLQTGVPSRFSGSGSGTDFTLTISSLQPEDFATYYCQQYYSGWTFGGGTKVEIK

SEQ ID NO: 843 - protein, 12 aa, synthetic construct
  REGION 1..12: note = source = /note="Description of Artificial Sequence: Synthetic peptide"
KASQSIHKNLAW

SEQ ID NO: 844 - protein, 7 aa, synthetic construct
  REGION 1..7: note = source = /note="Description of Artificial Sequence: Synthetic peptide"
YANSLQT

SEQ ID NO: 845 - protein, 8 aa, synthetic construct
  REGION 1..8: note = source = /note="Description of Artificial Sequence: Synthetic peptide"
QQYYSGWT

SEQ ID NO: 846 - protein, 106 aa, synthetic construct
  REGION 1..106: note = source = /note="Description of Artificial Sequence: Synthetic polypeptide"
DIQMTQSPSSLSASVGDRVTITCKASQSIHKNLAWYQQKPGKAPKFLIYYANSLQTGVPSRFSGSGSGTDFTLTISSLQPEDFATYYCQQYYSGWTFGGGTKVEIK

SEQ ID NO: 847 - protein, 12 aa, synthetic construct
  REGION 1..12: note = source = /note="Description of Artificial Sequence: Synthetic peptide"
KASQSIHKNLAW

SEQ ID NO: 848 - protein, 7 aa, synthetic construct
  REGION 1..7: note = source = /note="Description of Artificial Sequence: Synthetic peptide"
YANSLQT

SEQ ID NO: 849 - protein, 8 aa, synthetic construct
  REGION 1..8: note = source = /note="Description of Artificial Sequence: Synthetic peptide"
QQYYSGWT

SEQ ID NO: 850 - protein, 106 aa, synthetic construct
  REGION 1..106: note = source = /note="Description of Artificial Sequence: Synthetic polypeptide"
DIQMTQSPSSLSASVGDRVTITCKASQSIHKNLAWYQQKPGKAPKFLIYYANSLQTGIPSRFSGSGSGTDFTLTISSLQPEDFATYYCQQYYSGWTFGGGTKVEIK

SEQ ID NO: 851 - protein, 12 aa, synthetic construct
  REGION 1..12: note = source = /note="Description of Artificial Sequence: Synthetic peptide"
KASQSIHKNLAW

SEQ ID NO: 852 - protein, 7 aa, synthetic construct
  REGION 1..7: note = source = /note="Description of Artificial Sequence: Synthetic peptide"
YANSLQT

SEQ ID NO: 853 - protein, 8 aa, synthetic construct
  REGION 1..8: note = source = /note="Description of Artificial Sequence: Synthetic peptide"
QQYYSGWT

SEQ ID NO: 854 - protein, 106 aa, synthetic construct
  REGION 1..106: note = source = /note="Description of Artificial Sequence: Synthetic polypeptide"
DIQMTQSPSSLSASVGDRVTITCKASQSIHKNLAWYQQKPGKVPKLLIYYANSLQTGVPSRFSGSGSGTDFTLTISSLQPEDVATYYCQQYYSGWTFGGGTKVEIK

SEQ ID NO: 855 - protein, 12 aa, synthetic construct
  REGION 1..12: note = source = /note="Description of Artificial Sequence: Synthetic peptide"
KASQSIHKNLAW

SEQ ID NO: 856 - protein, 7 aa, synthetic construct
  REGION 1..7: note = source = /note="Description of Artificial Sequence: Synthetic peptide"
YANSLQT

SEQ ID NO: 857 - protein, 8 aa, synthetic construct
  REGION 1..8: note = source = /note="Description of Artificial Sequence: Synthetic peptide"
QQYYSGWT

SEQ ID NO: 858 - protein, 106 aa, synthetic construct
  REGION 1..106: note = source = /note="Description of Artificial Sequence: Synthetic polypeptide"
DIQMTQSPSSLSASVGDRVTITCKASQSIHKNLAWYQQKPGKVPKFLIYYANSLQTGVPSRFSGSGSGTDFTLTISSLQPEDVATYYCQQYYSGWTFGGGTKVEIK

SEQ ID NO: 859 - protein, 12 aa, synthetic construct
  REGION 1..12: note = source = /note="Description of Artificial Sequence: Synthetic peptide"
KASQSIHKNLAW

SEQ ID NO: 860 - protein, 7 aa, synthetic construct
  REGION 1..7: note = source = /note="Description of Artificial Sequence: Synthetic peptide"
YANSLQT

SEQ ID NO: 861 - protein, 8 aa, synthetic construct
  REGION 1..8: note = source = /note="Description of Artificial Sequence: Synthetic peptide"
QQYYSGWT

SEQ ID NO: 862 - protein, 106 aa, synthetic construct
  REGION 1..106: note = source = /note="Description of Artificial Sequence: Synthetic polypeptide"
DIQMTQSPSSLSASVGDRVTITCKASQSIHKNLAWYQQKPGKVPKFLIYYANSLQTGIPSRFSGSGSGTDFTLTISSLQPEDVATYYCQQYYSGWTFGGGTKVEIK

SEQ ID NO: 863 - protein, 12 aa, synthetic construct
  REGION 1..12: note = source = /note="Description of Artificial Sequence: Synthetic peptide"
KASQSIHKNLAW

SEQ ID NO: 864 - protein, 7 aa, synthetic construct
  REGION 1..7: note = source = /note="Description of Artificial Sequence: Synthetic peptide"
YANSLQT

SEQ ID NO: 865 - protein, 8 aa, synthetic construct
  REGION 1..8: note = source = /note="Description of Artificial Sequence: Synthetic peptide"
QQYYSGWT

SEQ ID NO: 866 - protein, 106 aa, synthetic construct; identical to SEQ ID NO: 842
  REGION 1..106: note = source = /note="Description of Artificial Sequence: Synthetic polypeptide"

SEQ ID NO: 867 - protein, 12 aa, synthetic construct
  REGION 1..12: note = source = /note="Description of Artificial Sequence: Synthetic peptide"
KASQSIHKNLAW

SEQ ID NO: 868 - protein, 7 aa, synthetic construct
  REGION 1..7: note = source = /note="Description of Artificial Sequence: Synthetic peptide"
YANSLQT

SEQ ID NO: 869 - protein, 8 aa, synthetic construct
  REGION 1..8: note = source = /note="Description of Artificial Sequence: Synthetic peptide"
QQYYSGWT

SEQ ID NO: 870 - protein, 106 aa, synthetic construct; identical to SEQ ID NO: 846
  REGION 1..106: note = source = /note="Description of Artificial Sequence: Synthetic polypeptide"

SEQ ID NO: 871 - protein, 12 aa, synthetic construct
  REGION 1..12: note = source = /note="Description of Artificial Sequence: Synthetic peptide"
KASQSIHKNLAW

SEQ ID NO: 872 - protein, 7 aa, synthetic construct
  REGION 1..7: note = source = /note="Description of Artificial Sequence: Synthetic peptide"
YANSLQT

SEQ ID NO: 873 - protein, 8 aa, synthetic construct
  REGION 1..8: note = source = /note="Description of Artificial Sequence: Synthetic peptide"
QQYYSGWT

SEQ ID NO: 874 - protein, 106 aa, synthetic construct
  REGION 1..106: note = source = /note="Description of Artificial Sequence: Synthetic polypeptide"
DIQMTQSPSSLSASVGDRVTITCKASQSIHKNLAWYQQKPGKAPKLLIYYANSLQTGVPSRFSGSGSGTDFTLTISSLQPEDFATYFCQQYYSGWTFGGGTKVEIK

SEQ ID NO: 875 - protein, 12 aa, synthetic construct
  REGION 1..12: note = source = /note="Description of Artificial Sequence: Synthetic peptide"
KASQSIHKNLAW

SEQ ID NO: 876 - protein, 7 aa, synthetic construct
  REGION 1..7: note = source = /note="Description of Artificial Sequence: Synthetic peptide"
YANSLQT

SEQ ID NO: 877 - protein, 8 aa, synthetic construct
  REGION 1..8: note = source = /note="Description of Artificial Sequence: Synthetic peptide"
QQYYSGWT

SEQ ID NO: 878 - protein, 106 aa, synthetic construct
  REGION 1..106: note = source = /note="Description of Artificial Sequence: Synthetic polypeptide"
DIQMTQSPSSLSASVGDRVTITCKASQSIHKNLAWYQQKPGKAPKFLIYYANSLQTGVPSRFSGSGSGTDFTLTISSLQPEDFATYFCQQYYSGWTFGGGTKVEIK

SEQ ID NO: 879 - protein, 12 aa, synthetic construct
  REGION 1..12: note = source = /note="Description of Artificial Sequence: Synthetic peptide"
KASQSIHKNLAW

SEQ ID NO: 880 - protein, 7 aa, synthetic construct
  REGION 1..7: note = source = /note="Description of Artificial Sequence: Synthetic peptide"
YANSLQT

SEQ ID NO: 881 - protein, 8 aa, synthetic construct
  REGION 1..8: note = source = /note="Description of Artificial Sequence: Synthetic peptide"
QQYYSGWT

SEQ ID NO: 882 - protein, 106 aa, synthetic construct
  REGION 1..106: note = source = /note="Description of Artificial Sequence: Synthetic polypeptide"
DIQMTQSPSSLSASVGDRVTITCKASQSIHKNLAWYQQKPGKAPKLLIYYANSLQTGIPSRFSGSGSGTDFTLTISSLQPEDFATYYCQQYYSGWTFGGGTKVEIK

SEQ ID NO: 883 - protein, 12 aa, synthetic construct
  REGION 1..12: note = source = /note="Description of Artificial Sequence: Synthetic peptide"
KASQSIHKNLAW

SEQ ID NO: 884 - protein, 7 aa, synthetic construct
  REGION 1..7: note = source = /note="Description of Artificial Sequence: Synthetic peptide"
YANSLQT

SEQ ID NO: 885 - protein, 8 aa, synthetic construct
  REGION 1..8: note = source = /note="Description of Artificial Sequence: Synthetic peptide"
QQYYSGWT

SEQ ID NO: 886 - protein, 121 aa, synthetic construct
  REGION 1..121: note = source = /note="Description of Artificial Sequence: Synthetic polypeptide"
DVQLQESGPGLVKPSQSLSLTCTVTGYSITSDYAWNWIRQFPGNKLEWMGYISNSGSASYNPSLKSRISITRDTSKNQFFLQLNSVTTEDTATYYCATLIYYDYGGAMNFWGQGTSVTVSS

SEQ ID NO: 887 - protein, 11 aa, synthetic construct
  REGION 1..11: note = source = /note="Description of Artificial Sequence: Synthetic peptide"
GYSITSDYAWN

SEQ ID NO: 888 - protein, 16 aa, synthetic construct
  REGION 1..16: note = source = /note="Description of Artificial Sequence: Synthetic peptide"
YISNSGSASYNPSLKS

SEQ ID NO: 889 - protein, 12 aa, synthetic construct
  REGION 1..12: note = source = /note="Description of Artificial Sequence: Synthetic peptide"
LIYYDYGGAMNF

SEQ ID NO: 890 - protein, 107 aa, synthetic construct
  REGION 1..107: note = source = /note="Description of Artificial Sequence: Synthetic polypeptide"
DIVMTQSHKFMSTSVGDRVSITCKASQGVSTTVAWYQQKPGQSPKLLIYSASYRYTGVPDRFTGSGSGTDFTFTISSVQSEDLAVYYCQHYYSTPWTFGGGTKLEIK

SEQ ID NO: 891 - protein, 11 aa, synthetic construct
  REGION 1..11: note = source = /note="Description of Artificial Sequence: Synthetic peptide"
KASQGVSTTVA

SEQ ID NO: 892 - protein, 7 aa, synthetic construct
  REGION 1..7: note = source = /note="Description of Artificial Sequence: Synthetic peptide"
SASYRYT

SEQ ID NO: 893 - protein, 9 aa, synthetic construct
  REGION 1..9: note = source = /note="Description of Artificial Sequence: Synthetic peptide"
QHYYSTPWT

SEQ ID NO: 894 - protein, 7 aa, synthetic construct
  REGION 1..7: note = source = /note="Description of Artificial Sequence: Synthetic peptide"
YASNLQT

SEQ ID NO: 895 - protein, 7 aa, synthetic construct
  REGION 1..7: note = source = /note="Description of Artificial Sequence: Synthetic peptide"
YASSLQT

SEQ ID NO: 896 - protein, 7 aa, synthetic construct
  REGION 1..7: note = source = /note="Description of Artificial Sequence: Synthetic peptide"
YASTLQT

SEQ ID NO: 897 - protein, 7 aa, synthetic construct
  REGION 1..7: note = source = /note="Description of Artificial Sequence: Synthetic peptide"
YATTLQT

SEQ ID NO: 898 - protein, 7 aa, synthetic construct
  REGION 1..7: note = source = /note="Description of Artificial Sequence: Synthetic peptide"
YASYLQT

SEQ ID NO: 899 - protein, 7 aa, synthetic construct
  REGION 1..7: note = source = /note="Description of Artificial Sequence: Synthetic peptide"
YANQLQT

SEQ ID NO: 900 - protein, 7 aa, synthetic construct
  REGION 1..7: note = source = /note="Description of Artificial Sequence: Synthetic peptide"
YAGSLQT

SEQ ID NO: 901 - protein, 7 aa, synthetic construct
  REGION 1..7: note = source = /note="Description of Artificial Sequence: Synthetic peptide"
YASQLQT

SEQ ID NO: 902 - protein, 7 aa, synthetic construct
  REGION 1..7: note = source = /note="Description of Artificial Sequence: Synthetic peptide"
YADSLQT

SEQ ID NO: 903 - protein, 107 aa, synthetic construct; identical to SEQ ID NO: 890
  REGION 1..107: note = source = /note="Description of Artificial Sequence: Synthetic polypeptide"

SEQ ID NO: 904 - protein, 11 aa, synthetic construct
  REGION 1..11: note = source = /note="Description of Artificial Sequence: Synthetic peptide"
KASQGVSTTVA

SEQ ID NO: 905 - protein, 7 aa, synthetic construct
  REGION 1..7: note = source = /note="Description of Artificial Sequence: Synthetic peptide"
SASYRYT

SEQ ID NO: 906 - protein, 9 aa, synthetic construct
  REGION 1..9: note = source = /note="Description of Artificial Sequence: Synthetic peptide"
QHYYSTPWT

SEQ ID NO: 907 - protein, 8 aa, synthetic construct
  REGION 1..8: note = source = /note="Description of Artificial Sequence: Synthetic peptide"
QQYYSGFT

SEQ ID NO: 908 - protein, 8 aa, synthetic construct
  REGION 1..8: note = source = /note="Description of Artificial Sequence: Synthetic peptide"
QQYYSGYT

SEQ ID NO: 909 - protein, 8 aa, synthetic construct
  REGION 1..8: note = source = /note="Description of Artificial Sequence: Synthetic peptide"
QQYYSGIT

SEQ ID NO: 910 - protein, 8 aa, synthetic construct
  REGION 1..8: note = source = /note="Description of Artificial Sequence: Synthetic peptide"
QQYYSGVT

SEQ ID NO: 911 - protein, 8 aa, synthetic construct
  REGION 1..8: note = source = /note="Description of Artificial Sequence: Synthetic peptide"
QQYYSGLT

SEQ ID NO: 912 - protein, 121 aa, synthetic construct; identical to SEQ ID NO: 886
  REGION 1..121: note = source = /note="Description of Artificial Sequence: Synthetic polypeptide"

SEQ ID NO: 913 - protein, 11 aa, synthetic construct
  REGION 1..11: note = source = /note="Description of Artificial Sequence: Synthetic peptide"
GYSITSDYAWN

SEQ ID NO: 914 - protein, 16 aa, synthetic construct
  REGION 1..16: note = source = /note="Description of Artificial Sequence: Synthetic peptide"
YISNSGSASYNPSLKS

SEQ ID NO: 915 - protein, 12 aa, synthetic construct
  REGION 1..12: note = source = /note="Description of Artificial Sequence: Synthetic peptide"
LIYYDYGGAMNF

SEQ ID NO: 916 - protein, 19 aa, synthetic construct
  REGION 1..19: note = source = /note="Description of Artificial Sequence: Synthetic peptide"
MPSFITLASLSTFEGYFDF

SEQ ID NO: 917 - protein, 19 aa, synthetic construct
  REGION 1..19: note = source = /note="Description of Artificial Sequence: Synthetic peptide"
MPSFITLASLSTYEGYFDF

SEQ ID NO: 918 - protein, 19 aa, synthetic construct
  REGION 1..19: note = source = /note="Description of Artificial Sequence: Synthetic peptide"
MPSFITLASLSTIEGYFDF

SEQ ID NO: 919 - protein, 19 aa, synthetic construct
  REGION 1..19: note = source = /note="Description of Artificial Sequence: Synthetic peptide"
MPSFITLASLSTVEGYFDF

SEQ ID NO: 920 - protein, 19 aa, synthetic construct
  REGION 1..19: note = source = /note="Description of Artificial Sequence: Synthetic peptide"
MPSFITLASLSTLEGYFDF

SEQ ID NO: 921 - protein, 119 aa, synthetic construct; identical to SEQ ID NO: 126
  REGION 1..119: note = source = /note="Description of Artificial Sequence: Synthetic polypeptide"

SEQ ID NO: 922 - protein, 5 aa, synthetic construct
  REGION 1..5: note = source = /note="Description of Artificial Sequence: Synthetic peptide"
SYVMH

SEQ ID NO: 923 - protein, 16 aa, synthetic construct
  REGION 1..16: note = source = /note="Description of Artificial Sequence: Synthetic peptide"
YIDPYNDGAKYNEKFK

SEQ ID NO: 924 - protein, 9 aa, synthetic construct
  REGION 1..9: note = source = /note="Description of Artificial Sequence: Synthetic peptide"
GPYGWYFDV

SEQ ID NO: 925 - protein, 16 aa, synthetic construct
  REGION 1..16: note = source = /note="Description of Artificial Sequence: Synthetic peptide"
YIDPYNRGAKYNEKFG

SEQ ID NO: 926 - protein, 16 aa, synthetic construct
  REGION 1..16: note = source = /note="Description of Artificial Sequence: Synthetic peptide"
YIDPYNLGAKYNEKFG

SEQ ID NO: 927 - protein, 16 aa, synthetic construct
  REGION 1..16: note = source = /note="Description of Artificial Sequence: Synthetic peptide"
YIDPYNKGAKYNEKFG

SEQ ID NO: 928 - protein, 16 aa, synthetic construct
  REGION 1..16: note = source = /note="Description of Artificial Sequence: Synthetic peptide"
YIDPYNFGAKYNEKFG

SEQ ID NO: 929 - protein, 16 aa, synthetic construct
  REGION 1..16: note = source = /note="Description of Artificial Sequence: Synthetic peptide"
YIDPYNSGAKYNEKFG

SEQ ID NO: 930 - protein, 16 aa, synthetic construct
  REGION 1..16: note = source = /note="Description of Artificial Sequence: Synthetic peptide"
YIDPYNYGAKYNEKFG

SEQ ID NO: 931 - protein, 16 aa, synthetic construct
  REGION 1..16: note = source = /note="Description of Artificial Sequence: Synthetic peptide"
YIDPYNVGAKYNEKFG

SEQ ID NO: 932 - protein, 17 aa, synthetic construct
  REGION 1..17: note = source = /note="Description of Artificial Sequence: Synthetic peptide"
YIDPYNDRAKYNEKFKG

SEQ ID NO: 933 - protein, 17 aa, synthetic construct
  REGION 1..17: note = source = /note="Description of Artificial Sequence: Synthetic peptide"
YIDPYNDNAKYNEKFKG

SEQ ID NO: 934 - protein, 17 aa, synthetic construct
  REGION 1..17: note = source = /note="Description of Artificial Sequence: Synthetic peptide"
YIDPYNDQAKYNEKFKG

SEQ ID NO: 935 - protein, 17 aa, synthetic construct
  REGION 1..17: note = source = /note="Description of Artificial Sequence: Synthetic peptide"
YIDPYNDEAKYNEKFKG

SEQ ID NO: 936 - protein, 17 aa, synthetic construct
  REGION 1..17: note = source = /note="Description of Artificial Sequence: Synthetic peptide"
YIDPYNDLAKYNEKFKG

SEQ ID NO: 937 - protein, 17 aa, synthetic construct
  REGION 1..17: note = source = /note="Description of Artificial Sequence: Synthetic peptide"
YIDPYNDKAKYNEKFKG

SEQ ID NO: 938 - protein, 17 aa, synthetic construct
  REGION 1..17: note = source = /note="Description of Artificial Sequence: Synthetic peptide"
YIDPYNDSAKYNEKFKG

SEQ ID NO: 939 - protein, 17 aa, synthetic construct
  REGION 1..17: note = source = /note="Description of Artificial Sequence: Synthetic peptide"
YIDPYNDYAKYNEKFKG

SEQ ID NO: 940 - protein, 17 aa, synthetic construct
  REGION 1..17: note = source = /note="Description of Artificial Sequence: Synthetic peptide"
YIDPYNDVAKYNEKFKG

SEQ ID NO: 941 - protein, 107 aa, synthetic construct; identical to SEQ ID NO: 131
  REGION 1..107: note = source = /note="Description of Artificial Sequence: Synthetic polypeptide"

SEQ ID NO: 942 - protein, 11 aa, synthetic construct
  REGION 1..11: note = source = /note="Description of Artificial Sequence: Synthetic peptide"
RASEHIYSYLS

SEQ ID NO: 943 - protein, 7 aa, synthetic construct
  REGION 1..7: note = source = /note="Description of Artificial Sequence: Synthetic peptide"
NAKTLAE

SEQ ID NO: 944 - protein, 9 aa, synthetic construct
  REGION 1..9: note = source = /note="Description of Artificial Sequence: Synthetic peptide"
QHHFGSPLT

SEQ ID NO: 945 - protein, 7 aa, synthetic construct
  REGION 1..7: note = source = /note="Description of Artificial Sequence: Synthetic peptide"
AAKTLAE

SEQ ID NO: 946 - protein, 7 aa, synthetic construct
  REGION 1..7: note = source = /note="Description of Artificial Sequence: Synthetic peptide"
YAKTLAE

SEQ ID NO: 947 - protein, 7 aa, synthetic construct
  REGION 1..7: note = source = /note="Description of Artificial Sequence: Synthetic peptide"
WAKTLAE

SEQ ID NO: 948 - protein, 7 aa, synthetic construct
  REGION 1..7: note = source = /note="Description of Artificial Sequence: Synthetic peptide"
SAKTLAE

SEQ ID NO: 949 - protein, 7 aa, synthetic construct
  REGION 1..7: note = source = /note="Description of Artificial Sequence: Synthetic peptide"
TAKTLAE

SEQ ID NO: 950 - protein, 7 aa, synthetic construct
  REGION 1..7: note = source = /note="Description of Artificial Sequence: Synthetic peptide"
IAKTLAE

SEQ ID NO: 951 - protein, 7 aa, synthetic construct
  REGION 1..7: note = source = /note="Description of Artificial Sequence: Synthetic peptide"
VAKTLAE

SEQ ID NO: 952 - protein, 7 aa, synthetic construct
  REGION 1..7: note = source = /note="Description of Artificial Sequence: Synthetic peptide"
NNKTLAE

SEQ ID NO: 953 - protein, 7 aa, synthetic construct
  REGION 1..7: note = source = /note="Description of Artificial Sequence: Synthetic peptide"
NIKTLAE

SEQ ID NO: 954 - protein, 7 aa, synthetic construct
  REGION 1..7: note = source = /note="Description of Artificial Sequence: Synthetic peptide"
NLLTLAE

SEQ ID NO: 955 - protein, 7 aa, synthetic construct
  REGION 1..7: note = source = /note="Description of Artificial Sequence: Synthetic peptide"
NTKTLAE

SEQ ID NO: 956 - protein, 7 aa, synthetic construct
  REGION 1..7: note = source = /note="Description of Artificial Sequence: Synthetic peptide"
NVKTLAE

SEQ ID NO: 957 - protein, 119 aa, synthetic construct
  REGION 1..119: note = source = /note="Description of Artificial Sequence: Synthetic polypeptide"
EVQLVQSGAEVKKPGASVKVSCKASGYTFSSYVMHWVRQAPGQRLEWIGYIDPYNDGAKYSQKFQGRVTLTRDTSASTAYMELSSLRSEDTAVYYCARGGPYGWYFDVWGQGTTVTVSS

SEQ ID NO: 958 - protein, 6 aa, synthetic construct
  REGION 1..6: note = source = /note="Description of Artificial Sequence: Synthetic peptide"
SYVMHW

SEQ ID NO: 959 - protein, 16 aa, synthetic construct
  REGION 1..16: note = source = /note="Description of Artificial Sequence: Synthetic peptide"
YIDPYNDGAKYSQKFQ

SEQ ID NO: 960 - protein, 10 aa, synthetic construct
  REGION 1..10: note = source = /note="Description of Artificial Sequence: Synthetic peptide"
GGPYGWYFDV

SEQ ID NO: 961 - protein, 119 aa, synthetic construct
  REGION 1..119: note = source = /note="Description of Artificial Sequence: Synthetic polypeptide"
EVQLVQSGAEVKKPGASVKVSCKASGYTFSSYVMHWVRQAPGQRLEWIGYIDPYNDGAKYSQKFQGRVTLTSDKSASTAYMELSSLRSEDTAVYYCARGGPYGWYFDVWGQGTTVTVSS

SEQ ID NO: 962 - protein, 5 aa, synthetic construct
  REGION 1..5: note = source = /note="Description of Artificial Sequence: Synthetic peptide"
SYVMH

SEQ ID NO: 963 - protein, 16 aa, synthetic construct
  REGION 1..16: note = source = /note="Description of Artificial Sequence: Synthetic peptide"
YIDPYNDGAKYSQKFQ

SEQ ID NO: 964 - protein, 10 aa, synthetic construct
  REGION 1..10: note = source = /note="Description of Artificial Sequence: Synthetic peptide"
GGPYGWYFDV

SEQ ID NO: 965 - protein, 119 aa, synthetic construct
  REGION 1..119: note = source = /note="Description of Artificial Sequence: Synthetic polypeptide"
EVQLVQSGAEVKKPGASVKVSCKASGYTFSSYVMHWVRQAPGQGLEWIGYIDPYNDGAKYAQKFQGRVTLTRDTSTSTVYMELSSLRSEDTAVYYCARGGPYGWYFDVWGQGTTVTVSS

SEQ ID NO: 966 - protein, 5 aa, synthetic construct
  REGION 1..5: note = source = /note="Description of Artificial Sequence: Synthetic peptide"
SYVMH

SEQ ID NO: 967 - protein, 13 aa, synthetic construct
  REGION 1..13: note = source = /note="Description of Artificial Sequence: Synthetic peptide"
YIDPYNDGAKYAQ

SEQ ID NO: 968 - protein, 10 aa, synthetic construct
  REGION 1..10: note = source = /note="Description of Artificial Sequence: Synthetic peptide"
GGPYGWYFDV

SEQ ID NO: 969 - protein, 119 aa, synthetic construct
  REGION 1..119: note = source = /note="Description of Artificial Sequence: Synthetic polypeptide"
EVQLVQSGAEVKKPGASVKVSCKASGYTFSSYVMHWVRQAPGQGLEWIGYIDPYNDGAKYAQKFQGRVTLTSDKSTSTVYMELSSLRSEDTAVYYCARGGPYGWYFDVWGQGTTVTVSS

SEQ ID NO: 970 - protein, 5 aa, synthetic construct
  REGION 1..5: note = source = /note="Description of Artificial Sequence: Synthetic peptide"
SYVMH

SEQ ID NO: 971 - protein, 16 aa, synthetic construct
  REGION 1..16: note = source = /note="Description of Artificial Sequence: Synthetic peptide"
YIDPYNDGAKYAQKFQ

SEQ ID NO: 972 - protein, 10 aa, synthetic construct
  REGION 1..10: note = source = /note="Description of Artificial Sequence: Synthetic peptide"
GGPYGWYFDV

SEQ ID NO: 973 - protein, 119 aa, synthetic construct
  REGION 1..119: note = source = /note="Description of Artificial Sequence: Synthetic polypeptide"
EVQLVQSGAEVKKPGSSVKVSCKASGYTFSSYVMHWVRQAPGQGLEWIGYIDPYNDGAKYAQKFQGRVTLTSDKSTSTAYMELSSLRSEDTAVYYCARGGPYGWYFDVWGQGTTVTVSS

SEQ ID NO: 974 - protein, 5 aa, synthetic construct
  REGION 1..5: note = source = /note="Description of Artificial Sequence: Synthetic peptide"
SYVMH

SEQ ID NO: 975 - protein, 16 aa, synthetic construct
  REGION 1..16: note = source = /note="Description of Artificial Sequence: Synthetic peptide"
YIDPYNDGAKYAQKFQ

SEQ ID NO: 976 - protein, 10 aa, synthetic construct
  REGION 1..10: note = source = /note="Description of Artificial Sequence: Synthetic peptide"
GGPYGWYFDV

SEQ ID NO: 977 - protein, 119 aa, synthetic construct
  REGION 1..119: note = source = /note="Description of Artificial Sequence: Synthetic polypeptide"
EVQLVQSGAEVKKPGASVKVSCKASGYTFSSYVMHWVRQAPGQGLEWIGYIDPYNDGAKYAQKFQGRVTLTSDKSISTAYMELSRLRSDDTVVYYCARGGPYGWYFDVWGQGTTVTVSS

SEQ ID NO: 978 - protein, 5 aa, synthetic construct
  REGION 1..5: note = source = /note="Description of Artificial Sequence: Synthetic peptide"
SYVMH

SEQ ID NO: 979 - protein, 16 aa, synthetic construct
  REGION 1..16: note = source = /note="Description of Artificial Sequence: Synthetic peptide"
YIDPYNDGAKYAQKFQ

SEQ ID NO: 980 - protein, 10 aa, synthetic construct
  REGION 1..10: note = source = /note="Description of Artificial Sequence: Synthetic peptide"
GGPYGWYFDV

SEQ ID NO: 981 - protein, 107 aa, synthetic construct
  REGION 1..107: note = source = /note="Description of Artificial Sequence: Synthetic polypeptide"
DIQMTQSPSSLSASVGDRVTITCRASEHIYSYLSWYQQKPGKAPKLLIYNAKTLAEGVPSRFSGSGSGTDFTLTISSLQPEDFATYYCQHHFGSPLTFGQGTRLEIK

SEQ ID NO: 982 - protein, 11 aa, synthetic construct
  REGION 1..11: note = source = /note="Description of Artificial Sequence: Synthetic peptide"
RASEHIYSYLS

SEQ ID NO: 983 - protein, 7 aa, synthetic construct
  REGION 1..7: note = source = /note="Description of Artificial Sequence: Synthetic peptide"
NAKTLAE

SEQ ID NO: 984 - protein, 9 aa, synthetic construct
  REGION 1..9: note = source = /note="Description of Artificial Sequence: Synthetic peptide"
QHHFGSPLT

SEQ ID NO: 985 - protein, 107 aa, synthetic construct
  REGION 1..107: note = source = /note="Description of Artificial Sequence: Synthetic polypeptide"
DIQMTQSPSSLSASVGDRVTITCRASEHIYSYLSWYQQKPGKAPKLLIYNAKTLAEGVPSRFSGSGSGTQFTLTISSLQPEDFATYYCQHHFGSPLTFGQGTRLEIK

SEQ ID NO: 986 - protein, 11 aa, synthetic construct
  REGION 1..11: note = source = /note="Description of Artificial Sequence: Synthetic peptide"
RASEHIYSYLS

SEQ ID NO: 987 - protein, 7 aa, synthetic construct
  REGION 1..7: note = source = /note="Description of Artificial Sequence: Synthetic peptide"
NAKTLAE

SEQ ID NO: 988 - protein, 9 aa, synthetic construct
  REGION 1..9: note = source = /note="Description of Artificial Sequence: Synthetic peptide"
QHHFGSPLT

SEQ ID NO: 989 - protein, 107 aa, synthetic construct
  REGION 1..107: note = source = /note="Description of Artificial Sequence: Synthetic polypeptide"
DIQMTQSPSSLSASVGDRVTITCRASEHIYSYLSWYQQKPGKVPKLLIYNAKTLAEGVPSRFSGSGSGTDFTLTISSLQPEDVATYYCQHHFGSPLTFGQGTRLEIK

SEQ ID NO: 990 - protein, 11 aa, synthetic construct
  REGION 1..11: note = source = /note="Description of Artificial Sequence: Synthetic peptide"
RASEHIYSYLS

SEQ ID NO: 991 - protein, 7 aa, synthetic construct
  REGION 1..7: note = source = /note="Description of Artificial Sequence: Synthetic peptide"
NAKTLAE

SEQ ID NO: 992 - protein, 9 aa, synthetic construct
  REGION 1..9: note = source = /note="Description of Artificial Sequence: Synthetic peptide"
QHHFGSPLT

SEQ ID NO: 993 - protein, 107 aa, synthetic construct
  REGION 1..107: note = source = /note="Description of Artificial Sequence: Synthetic polypeptide"
DIQMTQSPSSLSASVGDRVTITCRASEHIYSYLSWYQQKPGKVPKLLIYNAKTLAEGVPSRFSGSGSGTQFTLTISSLQPEDVATYYCQHHFGSPLTFGQGTRLEIK

SEQ ID NO: 994 - protein, 11 aa, synthetic construct
  REGION 1..11: note = source = /note="Description of Artificial Sequence: Synthetic peptide"
RASEHIYSYLS

SEQ ID NO: 995 - protein, 7 aa, synthetic construct
  REGION 1..7: note = source = /note="Description of Artificial Sequence: Synthetic peptide"
NAKTLAE

SEQ ID NO: 996 - protein, 9 aa, synthetic construct
  REGION 1..9: note = source = /note="Description of Artificial Sequence: Synthetic peptide"
QHHFGSPLT

SEQ ID NO: 997 - protein, 119 aa, synthetic construct; identical to SEQ ID NO: 977
  REGION 1..119: note = source = /note="Description of Artificial Sequence: Synthetic polypeptide"

SEQ ID NO: 998 - protein, 17 aa, synthetic construct
  REGION 1..17: note = source = /note="Description of Artificial Sequence: Synthetic peptide"
YIDPYNDGAKYAQKFQG

SEQ ID NO: 999 - protein, 17 aa, synthetic construct
  REGION 1..17: note = source = /note="Description of Artificial Sequence: Synthetic peptide"
YIDPYNDGAKYSQKFQG

SEQ ID NO: 1000 - protein, 119 aa, synthetic construct; identical to SEQ ID NO: 977
  REGION 1..119: note = source = /note="Description of Artificial Sequence: Synthetic polypeptide"

SEQ ID NO: 1001 - protein, 10 aa, synthetic construct
  REGION 1..10: note = source = /note="Description of Artificial Sequence: Synthetic peptide"
GGPYGAYFDV

SEQ ID NO: 1002 - protein, 10 aa, synthetic construct
  REGION 1..10: note = source = /note="Description of Artificial Sequence: Synthetic peptide"
GGPYGDYFDV

SEQ ID NO: 1003 - protein, 10 aa, synthetic construct
  REGION 1..10: note = source = /note="Description of Artificial Sequence: Synthetic peptide"
GGPYGEYFDV

SEQ ID NO: 1004 - protein, 10 aa, synthetic construct
  REGION 1..10: note = source = /note="Description of Artificial Sequence: Synthetic peptide"
GGPYGFYFDV

SEQ ID NO: 1005 - protein, 10 aa, synthetic construct
  REGION 1..10: note = source = /note="Description of Artificial Sequence: Synthetic peptide"
GGPYGGYFDV

SEQ ID NO: 1006 - protein, 10 aa, synthetic construct
  REGION 1..10: note = source = /note="Description of Artificial Sequence: Synthetic peptide"
GGPYGIYFDV

SEQ ID NO: 1007 - protein, 10 aa, synthetic construct
  REGION 1..10: note = source = /note="Description of Artificial Sequence: Synthetic peptide"
GGPYGKYFDV

SEQ ID NO: 1008 - protein, 10 aa, synthetic construct
  REGION 1..10: note = source = /note="Description of Artificial Sequence: Synthetic peptide"
GGPYGNYFDV

SEQ ID NO: 1009 - protein, 10 aa, synthetic construct
  REGION 1..10: note = source = /note="Description of Artificial Sequence: Synthetic peptide"
GGPYGQYFDV

SEQ ID NO: 1010 - protein, 10 aa, synthetic construct
  REGION 1..10: note = source = /note="Description of Artificial Sequence: Synthetic peptide"
GGPYGRYFDV

SEQ ID NO: 1011 - protein, 10 aa, synthetic construct
  REGION 1..10: note = source = /note="Description of Artificial Sequence: Synthetic peptide"
GGPYGSYFDV

SEQ ID NO: 1012 - protein, 10 aa, synthetic construct
  REGION 1..10: note = source = /note="Description of Artificial Sequence: Synthetic peptide"
GGPYGTYFDV

SEQ ID NO: 1013 - protein, 10 aa, synthetic construct
  REGION 1..10: note = source = /note="Description of Artificial Sequence: Synthetic peptide"
GGPYGVYFDV

SEQ ID NO: 1014 - protein, 10 aa, synthetic construct
  REGION 1..10: note = source = /note="Description of Artificial Sequence: Synthetic peptide"
GGPYGYYFDV

SEQ ID NO: 1015 - protein, 116 aa, synthetic construct
  REGION 1..116: note = source = /note="Description of Artificial Sequence: Synthetic polypeptide"
QVQLMESGPGLVQPSQTLSLTCTVSGFPLTSYTVHWVRQPPGKGLEWIGAIWSSGSTDYNSALKSRLNINRDSSKSQVFLKMNSLQTEDTAIYFCTKSGWAFFDYWGQGVMVTVSS

SEQ ID NO: 1016 - protein, 106 aa, synthetic construct
  REGION 1..106: note = source = /note="Description of Artificial Sequence: Synthetic polypeptide"
DIQMTQSPSLLSASVGDRVTLNCIASQNIYKSLAWYQLKLGEAPKLLIYNANSLQAGIPSRFSGSGSGTDFALTISGLQPEDVATYFCQQYSGGYTFGAGTKLELK

SEQ ID NO: 1017 - protein, 119 aa, synthetic construct
  REGION 1..119: note = source = /note="Description of Artificial Sequence: Synthetic polypeptide"
EVQLVESGGDLVQPGRSLKISCVASGFTFSDYYMAWVRLAPQKGLEWVASISYEGSRTHYGDSVRGRFIISRDNPKNILYLQMNSLGSEDTATYFCARHTGTLDWLVYWGQGTLVIVSS

SEQ ID NO: 1018 - protein, 106 aa, synthetic construct
  REGION 1..106: note = source = /note="Description of Artificial Sequence: Synthetic polypeptide"
NIVMAQSPKSMSISAGDRVTMNCKASQNVDNNIAWYQQKPGQSPKLLIFYASNRYSGVPDRFTGGGYGTDFTLTIKSVQAEDAAFYYCQRIYNFPTFGSGTKLEIK

SEQ ID NO: 1019 - protein, 120 aa, synthetic construct
  REGION 1..120: note = source = /note="Description of Artificial Sequence: Synthetic polypeptide"
QVQLVQSGAEVKKPGASVKVSCKASGYTFTDYNINWVRQAPGQGLEWMGYIYPYIGGSGYAQKFQGRVTMTRDTSTSTVYMELSSLRSEDTAVYYCAREDKTARNAMDYWGQGTLVTVSS

SEQ ID NO: 1020 - protein, 8 aa, synthetic construct
  REGION 1..8: note = source = /note="Description of Artificial Sequence: Synthetic peptide"
GYTFTDYN

SEQ ID NO: 1021 - protein, 8 aa, synthetic construct
  REGION 1..8: note = source = /note="Description of Artificial Sequence: Synthetic peptide"
IYPYIGGS

SEQ ID NO: 1022 - protein, 13 aa, synthetic construct
  REGION 1..13: note = source = /note="Description of Artificial Sequence: Synthetic peptide"
AREDKTARNAMDY

SEQ ID NO: 1023 - protein, 447 aa, synthetic construct
  REGION 1..447: note = source = /note="Description of Artificial Sequence: Synthetic polypeptide"
QVQLVQSGAEVKKPGASVKVSCKASGYTFTDYNINWVRQAPGQGLEWMGYIYPYIGGSGYAQKFQGRVTMTRDTSTSTVYMELSSLRSEDTAVYYCAREDKTARNAMDYWGQGTLVTVSSASTKGPSVFPLAPCSRSTSESTAALGCLVKDYFPEPVTVSWNSGALTSGVHTFPAVLQSSGLYSLSSVVTVPSSSLGTKTYTCNVDHKPSNTKVDKRVESKYGPPCPPCPAPEFLGGPSVFLFPPKPKDTLMISRTPEVTCVVVDVSQEDPEVQFNWYVDGVEVHNAKTKPREEQFNSTYRVVSVLTVLHQDWLNGKEYKCKVSNKGLPSSIEKTISKAKGQPREPQVYTLPPSQEEMTKNQVSLTCLVKGFYPSDIAVEWESNGQPENNYKTTPPVLDSDGSFFLYSRLTVDKSRWQEGNVFSCSVMHEALHNHYTQKSLSLSPGK

SEQ ID NO: 1024 - protein, 107 aa, synthetic construct
  REGION 1..107: note = source = /note="Description of Artificial Sequence: Synthetic polypeptide"
DIQMTQSPSSLSASVGDRVTITCRVSENIYSNLAWYQQKPGKAPKLLIYEATNLAEGVPSRFSGSGSGTDFTLTISSLQPEDFATYYCQHFWGTPYTFGQGTKLEIK

SEQ ID NO: 1025 - protein, 6 aa, synthetic construct
  REGION 1..6: note = source = /note="Description of Artificial Sequence: Synthetic peptide"
ENIYSN

SEQ ID NO: 1026 - skipped

SEQ ID NO: 1027 - protein, 9 aa, synthetic construct
  REGION 1..9: note = source = /note="Description of Artificial Sequence: Synthetic peptide"
QHFWGTPYT

SEQ ID NO: 1028 - protein, 214 aa, synthetic construct
  REGION 1..214: note = source = /note="Description of Artificial Sequence: Synthetic polypeptide"
DIQMTQSPSSLSASVGDRVTITCRVSENIYSNLAWYQQKPGKAPKLLIYEATNLAEGVPSRFSGSGSGTDFTLTISSLQPEDFATYYCQHFWGTPYTFGQGTKLEIKRTVAAPSVFIFPPSDEQLKSGTASVVCLLNNFYPREAKVQWKVDNALQSGNSQESVTEQDSKDSTYSLSSTLTLSKADYEKHKVYACEVTHQGLSSPVTKSFNRGEC

SEQ ID NO: 1029 - protein, 119 aa, synthetic construct
  REGION 1..119: note = source = /note="Description of Artificial Sequence: Synthetic polypeptide"
QVQLVQSGAEVKKPGASVKVSCKASGYAFTNYLIEWVRQAPGQGLEWIGVINPGSGGIYYAQKFQGRVTMTADTSTSTVYMELSSLRSEDTAVYYCARSETHDTWFAYWGQGTLVTVSS

SEQ ID NO: 1030 - protein, 8 aa, synthetic construct
  REGION 1..8: note = source = /note="Description of Artificial Sequence: Synthetic peptide"
GYAFTNYL

SEQ ID NO: 1031 - protein, 8 aa, synthetic construct
  REGION 1..8: note = source = /note="Description of Artificial Sequence: Synthetic peptide"
INPGSGGI

SEQ ID NO: 1032 - protein, 12 aa, synthetic construct
  REGION 1..12: note = source = /note="Description of Artificial Sequence: Synthetic peptide"
ARSETHDTWFAY

SEQ ID NO: 1033 - protein, 446 aa, synthetic construct
  REGION 1..446: note = source = /note="Description of Artificial Sequence: Synthetic polypeptide"
QVQLVQSGAEVKKPGASVKVSCKASGYAFTNYLIEWVRQAPGQGLEWIGVINPGSGGIYYAQKFQGRVTMTADTSTSTVYMELSSLRSEDTAVYYCARSETHDTWFAYWGQGTLVTVSSASTKGPSVFPLAPCSRSTSESTAALGCLVKDYFPEPVTVSWNSGALTSGVHTFPAVLQSSGLYSLSSVVTVPSSSLGTKTYTCNVDHKPSNTKVDKRVESKYGPPCPPCPAPEFLGGPSVFLFPPKPKDTLMISRTPEVTCVVVDVSQEDPEVQFNWYVDGVEVHNAKTKPREEQFNSTYRVVSVLTVLHQDWLNGKEYKCKVSNKGLPSSIEKTISKAKGQPREPQVYTLPPSQEEMTKNQVSLTCLVKGFYPSDIAVEWESNGQPENNYKTTPPVLDSDGSFFLYSRLTVDKSRWQEGNVFSCSVMHEALHNHYTQKSLSLSPGK

SEQ ID NO: 1034 - protein, 107 aa, synthetic construct
  REGION 1..107: note = source = /note="Description of Artificial Sequence: Synthetic polypeptide"
DIQMTQSPSSLSASVGDRVTITCKASQSVRIAVAWFQQKPGKAPKALIYLASTRHTGVPSRFSGSGSGTDFTLTISSVQPEDFATYYCLQHWNYPYTFGQGTKLEIK

SEQ ID NO: 1035 - protein, 6 aa, synthetic construct
  REGION 1..6: note = source = /note="Description of Artificial Sequence: Synthetic peptide"
QSVRIA

SEQ ID NO: 1036 - skipped

SEQ ID NO: 1037 - protein, 9 aa, synthetic construct
  REGION 1..9: note = source = /note="Description of Artificial Sequence: Synthetic peptide"
LQHWNYPYT

SEQ ID NO: 1038 - protein, 214 aa, synthetic construct
  REGION 1..214: note = source = /note="Description of Artificial Sequence: Synthetic polypeptide"
DIQMTQSPSSLSASVGDRVTITCKASQSVRIAVAWFQQKPGKAPKALIYLASTRHTGVPSRFSGSGSGTDFTLTISSVQPEDFATYYCLQHWNYPYTFGQGTKLEIKRTVAAPSVFIFPPSDEQLKSGTASVVCLLNNFYPREAKVQWKVDNALQSGNSQESVTEQDSKDSTYSLSSTLTLSKADYEKHKVYACEVTHQGLSSPVTKSFNRGEC

SEQ ID NO: 1039 - protein, 120 aa, synthetic construct
  REGION 1..120: note = source = /note="Description of Artificial Sequence: Synthetic polypeptide"
EVQLQQSGAELVRSGASVKMSCKVNDYTFTNYNMHWLRQTPGQGLEWIGYIYPGNGDTNYNQKFKGKATLTADTSSSTAYMQIISLTSEDPAVYFCARQGIHYYYIDVWGAGTTVTVSSG

SEQ ID NO: 1040 - protein, 10 aa, synthetic construct
  REGION 1..10: note = source = /note="Description of Artificial Sequence: Synthetic peptide"
DYTFTNYNMH

SEQ ID NO: 1041 - protein, 13 aa, synthetic construct
  REGION 1..13: note = source = /note="Description of Artificial Sequence: Synthetic peptide"
YIYPGNGDTNYNQ

SEQ ID NO: 1042 - protein, 10 aa, synthetic construct
  REGION 1..10: note = source = /note="Description of Artificial Sequence: Synthetic peptide"
QGIHYYYIDV

SEQ ID NO: 1043 - protein, 110 aa, synthetic construct
  REGION 1..110: note = source = /note="Description of Artificial Sequence: Synthetic polypeptide"
DIEMTQSPATLSVTPGDRVSLSCRASQSIRDYLHWYQQKSHESPRLLIKYVSQSISGIPSRFSGSGSGSEFTLSINSVEPEDVGVYYCQNGHSLPLTFGSGTKLEIKRTV

SEQ ID NO: 1044 - protein, 11 aa, synthetic construct
  REGION 1..11: note = source = /note="Description of Artificial Sequence: Synthetic peptide"
RASQSIRDYLH

SEQ ID NO: 1045 - protein, 7 aa, synthetic construct
  REGION 1..7: note = source = /note="Description of Artificial Sequence: Synthetic peptide"
YVSQSIS

SEQ ID NO: 1046 - protein, 9 aa, synthetic construct
  REGION 1..9: note = source = /note="Description of Artificial Sequence: Synthetic peptide"
QNGHSLPLT

SEQ ID NO: 1047 - protein, 118 aa, synthetic construct
  REGION 1..118: note = source = /note="Description of Artificial Sequence: Synthetic polypeptide"
QVQLQQSGAELAKPGASVKMSCKASGYTFTSDWMHWVKQRPGQGLEWIGYINPSTGYTEYNQKFKDKATLTADKSSSTAYMQLRSLTSEDSAVYYCARGSSGSWFAYWGQGTLVTVSA

SEQ ID NO: 1048 - protein, 5 aa, synthetic construct
  REGION 1..5: note = source = /note="Description of Artificial Sequence: Synthetic peptide"
SDWMH

SEQ ID NO: 1049 - protein, 17 aa, synthetic construct
  REGION 1..17: note = source = /note="Description of Artificial Sequence: Synthetic peptide"
YINPSTGYTEYNQKFKD

SEQ ID NO: 1050 - protein, 9 aa, synthetic construct
  REGION 1..9: note = source = /note="Description of Artificial Sequence: Synthetic peptide"
GSSGSWFAY

SEQ ID NO: 1051 - protein, 111 aa, synthetic construct
  REGION 1..111: note = source = /note="Description of Artificial Sequence: Synthetic polypeptide"
DIVLTQSPASLAVSLGQRATISCRASQSVSTSSYSYMHWYQQKPGQPPKLLIKYASNLESGVPARFSGSGSGTDFTLNIHPVEEEDTATYYCQHSWEIPYTFGGGTKLEIK

SEQ ID NO: 1052 - protein, 15 aa, synthetic construct
  REGION 1..15: note = source = /note="Description of Artificial Sequence: Synthetic peptide"
RASQSVSTSSYSYMH

SEQ ID NO: 1053 - protein, 7 aa, synthetic construct
  REGION 1..7: note = source = /note="Description of Artificial Sequence: Synthetic peptide"
YASNLES

SEQ ID NO: 1054 - protein, 9 aa, synthetic construct
  REGION 1..9: note = source = /note="Description of Artificial Sequence: Synthetic peptide"
QHSWEIPYT

SEQ ID NO: 1055 - protein, 118 aa, synthetic construct; identical to SEQ ID NO: 1047
  REGION 1..118: note = source = /note="Description of Artificial Sequence: Synthetic polypeptide"

SEQ ID NO: 1056 - protein, 5 aa, synthetic construct
  REGION 1..5: note = source = /note="Description of Artificial Sequence: Synthetic peptide"
SDWMH

SEQ ID NO: 1057 - protein, 17 aa, synthetic construct
  REGION 1..17: note = source = /note="Description of Artificial Sequence: Synthetic peptide"
YINPSTGYTEYNQKFKD

SEQ ID NO: 1058 - protein, 9 aa, synthetic construct
  REGION 1..9: note = source = /note="Description of Artificial Sequence: Synthetic peptide"
GSSGSWFAY

SEQ ID NO: 1059 - protein, 112 aa, synthetic construct
  REGION 1..112: note = source = /note="Description of Artificial Sequence: Synthetic polypeptide"
DVVMTQTPLTLSVTIGQPASISCKSSQSLLNSDGKTYLNWLLQRPGQSPKRLIYLVSKLDSGVPDRFTGSGSGTDFTLKISRVEAEDLGVYYCWQGTHFPRTFGGGTKLEIK

SEQ ID NO: 1060 - protein, 16 aa, synthetic construct
  REGION 1..16: note = source = /note="Description of Artificial Sequence: Synthetic peptide"
KSSQSLLNSDGKTYLN

SEQ ID NO: 1061 - protein, 7 aa, synthetic construct
  REGION 1..7: note = source = /note="Description of Artificial Sequence: Synthetic peptide"
LVSKLDS

SEQ ID NO: 1062 - protein, 9 aa, synthetic construct
  REGION 1..9: note = source = /note="Description of Artificial Sequence: Synthetic peptide"
WQGTHFPRT

SEQ ID NO: 1063 - protein, 114 aa, synthetic construct
  REGION 1..114: note = source = /note="Description of Artificial Sequence: Synthetic polypeptide"
EVQLQQSVAELVRPGTSVTISCKASGYTFTNYWLGWVKQRPGHGLEWIGDIFPGGDYPNYNEKFKGKATLTADTSSSTAYMQLSSLTSEDSSVYFCTRGYFDVWGAGTTVTVSS

SEQ ID NO: 1064 - protein, 6 aa, synthetic construct
  REGION 1..6: note = source = /note="Description of Artificial Sequence: Synthetic peptide"
TNYWLG

SEQ ID NO: 1065 - protein, 17 aa, synthetic construct
  REGION 1..17: note = source = /note="Description of Artificial Sequence: Synthetic peptide"
DIFPGGDYPNYNEKFKG

SEQ ID NO: 1066 - protein, 7 aa, synthetic construct
  REGION 1..7: note = source = /note="Description of Artificial Sequence: Synthetic peptide"
TRGYFDV

SEQ ID NO: 1067 - protein, 114 aa, synthetic construct
  REGION 1..114: note = source = /note="Description of Artificial Sequence: Synthetic polypeptide"
DIQMTQSPSSLSVSAGEKVTMSCKSSQSLLNSENQKNYLAWFQQKPGQPPKMLIYGASTRESGVPDRFTGSGSGTDFTLTISSVQAEDLAVYYCQNDHSYPFTFGSGTKLEIKR

SEQ ID NO: 1068 - protein, 17 aa, synthetic construct
  REGION 1..17: note = source = /note="Description of Artificial Sequence: Synthetic peptide"
KSSQSLLNSENQKNYLA

SEQ ID NO: 1069 - protein, 7 aa, synthetic construct
  REGION 1..7: note = source = /note="Description of Artificial Sequence: Synthetic peptide"
GASTRES

SEQ ID NO: 1070 - protein, 7 aa, synthetic construct
  REGION 1..7: note = source = /note="Description of Artificial Sequence: Synthetic peptide"
QNDHSYP

SEQ ID NO: 1071 - protein, 120 aa, synthetic construct
  REGION 1..120: note = source = /note="Description of Artificial Sequence: Synthetic polypeptide"
EVQLVLSGGGFVQPGGSLKLSCAASGFTFSSYAMSWVRQNPERRLVWVATITGGGRNTYYPDSVKGRFTISRDNAKNTLYLQMSSLRSEDTAMYYCTRQGYDGYTWFAYWGQGTLVTVSS

SEQ ID NO: 1072 - protein, 8 aa, synthetic construct
  REGION 1..8: note = source = /note="Description of Artificial Sequence: Synthetic peptide"
GFTFSSYA

SEQ ID NO: 1073 - protein, 8 aa, synthetic construct
  REGION 1..8: note = source = /note="Description of Artificial Sequence: Synthetic peptide"
ITGGGRNT

SEQ ID NO: 1074 - protein, 13 aa, synthetic construct
  REGION 1..13: note = source = /note="Description of Artificial Sequence: Synthetic peptide"
TRQGYDGYTWFAY

SEQ ID NO: 1075 - protein, 447 aa, synthetic construct
  REGION 1..447: note = source = /note="Description of Artificial Sequence: Synthetic polypeptide"
EVQLVLSGGGFVQPGGSLKLSCAASGFTFSSYAMSWVRQNPERRLVWVATITGGGRNTYYPDSVKGRFTISRDNAKNTLYLQMSSLRSEDTAMYYCTRQGYDGYTWFAYWGQGTLVTVSSASTKGPSVFPLAPCSRSTSESTAALGCLVKDYFPEPVTVSWNSGALTSGVHTFPAVLQSSGLYSLSSVVTVPSSSLGTKTYTCNVDHKPSNTKVDKRVESKYGPPCPPCPAPEFLGGPSVFLFPPKPKDTLMISRTPEVTCVVVDVSQEDPEVQFNWYVDGVEVHNAKTKPREEQFNSTYRVVSVLTVLHQDWLNGKEYKCKVSNKGLPSSIEKTISKAKGQPREPQVYTLPPSQEEMTKNQVSLTCLVKGFYPSDIAVEWESNGQPENNYKTTPPVLDSDGSFFLYSRLTVDKSRWQEGNVFSCSVMHEALHNHYTQKSLSLSPGK

SEQ ID NO: 1076 - protein, 112 aa, synthetic construct
  REGION 1..112: note = source = /note="Description of Artificial Sequence: Synthetic polypeptide"
DIVLTQSPTSLAVSLGQRATISCRASESVDNSGISFMNWFQQKPGQPPKLLIYAASNPGSGVPARFSGSGSGTDFSLNIHPMEEDDTAMYFCQQSKEVPWTFGGGTELEIKR

SEQ ID NO: 1077 - protein, 10 aa, synthetic construct
  REGION 1..10: note = source = /note="Description of Artificial Sequence: Synthetic peptide"
ESVDNSGISF

SEQ ID NO: 1078 - skipped

SEQ ID NO: 1079 - protein, 9 aa, synthetic construct
  REGION 1..9: note = source = /note="Description of Artificial Sequence: Synthetic peptide"
QQSKEVPWT

SEQ ID NO: 1080 - protein, 218 aa, synthetic construct
  REGION 1..218: note = source = /note="Description of Artificial Sequence: Synthetic polypeptide"
DIVLTQSPTSLAVSLGQRATISCRASESVDNSGISFMNWFQQKPGQPPKLLIYAASNPGSGVPARFSGSGSGTDFSLNIHPMEEDDTAMYFCQQSKEVPWTFGGGTELEIKRTVAAPSVFIFPPSDEQLKSGTASVVCLLNNFYPREAKVQWKVDNALQSGNSQESVTEQDSKDSTYSLSSTLTLSKADYEKHKVYACEVTHQGLSSPVTKSFNRGEC

SEQ ID NO: 1081 - protein, 447 aa, synthetic construct
  REGION 1..447: note = source = /note="Description of Artificial Sequence: Synthetic polypeptide"
QVQLVQSGVEVKKPGASVKVSCKASGYTFTNYYMYWVRQAPGQGLEWMGGINPSNGGTNFNEKFKNRVTLTTDSSTTTAYMELKSLQFDDTAVYYCARRDYRFDMGFDYWGQGTTVTVSSASTKGPSVFPLAPCSRSTSESTAALGCLVKDYFPEPVTVSWNSGALTSGVHTFPAVLQSSGLYSLSSVVTVPSSSLGTKTYTCNVDHKPSNTKVDKRVESKYGPPCPPCPAPEFLGGPSVFLFPPKPKDTLMISRTPEVTCVVVDVSQEDPEVQFNWYVDGVEVHNAKTKPREEQFNSTYRVVSVLTVLHQDWLNGKEYKCKVSNKGLPSSIEKTISKAKGQPREPQVYTLPPSQEEMTKNQVSLTCLVKGFYPSDIAVEWESNGQPENNYKTTPPVLDSDGSFFLYSRLTVDKSRWQEGNVFSCSVMHEALHNHYTQKSLSLSLGK

SEQ ID NO: 1082 - protein, 218 aa, synthetic construct
  REGION 1..218: note = source = /note="Description of Artificial Sequence: Synthetic polypeptide"
EIVLTQSPATLSLSPGERATLSCRASKGVSTSGYSYLHWYQQKPGQAPRLLIYLASYLESGVPARFSGSGSGTDFTLTISSLEPEDFAVYYCQHSRDLPLTFGGGTKVEIKRTVAAPSVFIFPPSDEQLKSGTASVVCLLNNFYPREAKVQWKVDNALQSGNSQESVTEQDSKDSTYSLSSTLTLSKADYEKHKVYACEVTHQGLSSPVTKSFNRGEC

SEQ ID NO: 1083 - protein, 113 aa, synthetic construct [sequence omitted]

SEQ ID NO: 1084 - protein, 8 aa, synthetic construct
  REGION 1..8: note = source = /note="Description of Artificial Sequence: Synthetic peptide"
GITFSNSG

SEQ ID NO: 1085 - protein, 8 aa, synthetic construct
  REGION 1..8: note = source = /note="Description of Artificial Sequence: Synthetic peptide"
IWYDGSKR

SEQ ID NO: 1086 - protein, 6 aa, synthetic construct
  REGION 1..6: note = source = /note="Description of Artificial Sequence: Synthetic peptide"
ATNDDY

SEQ ID NO: 1087 - protein, 440 aa, synthetic construct
  REGION 1..440: note = source = /note="Description of Artificial Sequence: Synthetic polypeptide"
QVQLVESGGGVVQPGRSLRLDCKASGITFSNSGMHWVRQAPGKGLEWVAVIWYDGSKRYYADSVKGRFTISRDNSKNTLFLQMNSLRAEDTAVYYCATNDDYWGQGTLVTVSSASTKGPSVFPLAPCSRSTSESTAALGCLVKDYFPEPVTVSWNSGALTSGVHTFPAVLQSSGLYSLSSVVTVPSSSLGTKTYTCNVDHKPSNTKVDKRVESKYGPPCPPCPAPEFLGGPSVFLFPPKPKDTLMISRTPEVTCVVVDVSQEDPEVQFNWYVDGVEVHNAKTKPREEQFNSTYRVVSVLTVLHQDWLNGKEYKCKVSNKGLPSSIEKTISKAKGQPREPQVYTLPPSQEEMTKNQVSLTCLVKGFYPSDIAVEWESNGQPENNYKTTPPVLDSDGSFFLYSRLTVDKSRWQEGNVFSCSVMHEALHNHYTQKSLSLSLGK

SEQ ID NO: 1088 - protein, 108 aa, synthetic construct
  REGION 1..108: note = source = /note="Description of Artificial Sequence: Synthetic polypeptide"
EIVLTQSPATLSLSPGERATLSCRASQSVSSYLAWYQQKPGQAPRLLIYDASNRATGIPARFSGSGSGTDFTLTISSLEPEDFAVYYCQQSSNWPRTFGQGTKVEIKR

SEQ ID NO: 1089 - protein, 6 aa, synthetic construct
  REGION 1..6: note = source = /note="Description of Artificial Sequence: Synthetic peptide"
QSVSSY

SEQ ID NO: 1090 - skipped

SEQ ID NO: 1091 - protein, 9 aa, synthetic construct
  REGION 1..9: note = source = /note="Description of Artificial Sequence: Synthetic peptide"
QQSSNWPRT

SEQ ID NO: 1092 - protein, 214 aa, synthetic construct
  REGION 1..214: note = source = /note="Description of Artificial Sequence: Synthetic polypeptide"
EIVLTQSPATLSLSPGERATLSCRASQSVSSYLAWYQQKPGQAPRLLIYDASNRATGIPARFSGSGSGTDFTLTISSLEPEDFAVYYCQQSSNWPRTFGQGTKVEIKRTVAAPSVFIFPPSDEQLKSGTASVVCLLNNFYPREAKVQWKVDNALQSGNSQESVTEQDSKDSTYSLSSTLTLSKADYEKHKVYACEVTHQGLSSPVTKSFNRGEC

SEQ ID NO: 1093 - protein, 440 aa, synthetic construct; identical to SEQ ID NO: 1087
  REGION 1..440: note = source = /note="Description of Artificial Sequence: Synthetic polypeptide"

SEQ ID NO: 1094 - protein, 214 aa, synthetic construct; identical to SEQ ID NO: 1092
  REGION 1..214: note = source = /note="Description of Artificial Sequence: Synthetic polypeptide"

SEQ ID NO: 1095 - protein, 117 aa, synthetic construct [sequence omitted]

SEQ ID NO: 1096 - protein, 8 aa, synthetic construct
  REGION 1..8: note = source = /note="Description of Artificial Sequence: Synthetic peptide"
GFTFSNFG

SEQ ID NO: 1097 - protein, 8 aa, synthetic construct
  REGION 1..8: note = source = /note="Description of Artificial Sequence: Synthetic peptide"
ISGGGRDT

SEQ ID NO: 1098 - protein, 10 aa, synthetic construct
  REGION 1..10: note = source = /note="Description of Artificial Sequence: Synthetic peptide"
VKWGNIYFDY

SEQ ID NO: 1099 - protein, 107 aa, synthetic construct [sequence omitted]

SEQ ID NO: 1100 - protein, 6 aa, synthetic construct
  REGION 1..6: note = source = /note="Description of Artificial Sequence: Synthetic peptide"
LSINTF

SEQ ID NO: 1101 - skipped

SEQ ID NO: 1102 - protein, 9 aa, synthetic construct
  REGION 1..9: note = source = /note="Description of Artificial Sequence: Synthetic peptide"
QQSSNTPFT

SEQ ID NO: 1103 - protein, 444 aa, synthetic construct
  REGION 1..444: note = source = /note="Description of Artificial Sequence: Synthetic polypeptide"
EVQLLESGGVLVQPGGSLRLSCAASGFTFSNFGMTWVRQAPGKGLEWVSGISGGGRDTYFADSVKGRFTISRDNSKNTLYLQMNSLKGEDTAVYYCVKWGNIYFDYWGQGTLVTVSSASTKGPSVFPLAPCSRSTSESTAALGCLVKDYFPEPVTVSWNSGALTSGVHTFPAVLQSSGLYSLSSVVTVPSSSLGTKTYTCNVDHKPSNTKVDKRVESKYGPPCPPCPAPEFLGGPSVFLFPPKPKDTLMISRTPEVTCVVVDVSQEDPEVQFNWYVDGVEVHNAKTKPREEQFNSTYRVVSVLTVLHQDWLNGKEYKCKVSNKGLPSSIEKTISKAKGQPREPQVYTLPPSQEEMTKNQVSLTCLVKGFYPSDIAVEWESNGQPENNYKTTPPVLDSDGSFFLYSRLTVDKSRWQEGNVFSCSVMHEALHNHYTQKSLSLSLGK

SEQ ID NO: 1104 - protein, 214 aa, synthetic construct
  REGION 1..214: note = source = /note="Description of Artificial Sequence: Synthetic polypeptide"
DIQMTQSPSSLSASVGDSITITCRASLSINTFLNWYQQKPGKAPNLLIYAASSLHGGVPSRFSGSGSGTDFTLTIRTLQPEDFATYYCQQSSNTPFTFGPGTVVDFRRTVAAPSVFIFPPSDEQLKSGTASVVCLLNNFYPREAKVQWKVDNALQSGNSQESVTEQDSKDSTYSLSSTLTLSKADYEKHKVYACEVTHQGLSSPVTKSFNRGEC

SEQ ID NO: 1105 - protein, 8 aa, synthetic construct
  REGION 1..8: note = source = /note="Description of Artificial Sequence: Synthetic peptide"
GFTFSSYA

SEQ ID NO: 1106 - protein, 5 aa, synthetic construct
  REGION 1..5: note = source = /note="Description of Artificial Sequence: Synthetic peptide"
SYAMH

SEQ ID NO: 1107 - protein, 8 aa, synthetic construct
  REGION 1..8: note = source = /note="Description of Artificial Sequence: Synthetic peptide"
ISYAGEVK

SEQ ID NO: 1108 - protein, 17 aa, synthetic construct
  REGION 1..17: note = source = /note="Description of Artificial Sequence: Synthetic peptide"
VISYAGEVKYYADSVKG

SEQ ID NO: 1109 - protein, 14 aa, synthetic construct
  REGION 1..14: note = source = /note="Description of Artificial Sequence: Synthetic peptide"
ARDPLPLHYYGMDV

SEQ ID NO: 1110 - protein, 12 aa, synthetic construct
  REGION 1..12: note = source = /note="Description of Artificial Sequence: Synthetic peptide"
DPLPLHYYGMDV

SEQ ID NO: 1111 - protein, 8 aa, synthetic construct
  REGION 1..8: note = source = /note="Description of Artificial Sequence: Synthetic peptide"
SSNMGRRP

SEQ ID NO: 1112 - protein, 13 aa, synthetic construct
  REGION 1..13: note = source = /note="Description of Artificial Sequence: Synthetic peptide"
SGSSSNMGRRPVN

SEQ ID NO: 1113 - skipped

SEQ ID NO: 1114 - protein, 7 aa, synthetic construct
  REGION 1..7: note = source = /note="Description of Artificial Sequence: Synthetic peptide"
SQNQRPS

SEQ ID NO: 1115 - protein, 11 aa, synthetic construct
  REGION 1..11: note = source = /note="Description of Artificial Sequence: Synthetic peptide"
AVWDDIGRVLQ

SEQ ID NO: 1116 - protein, 11 aa, synthetic construct
  REGION 1..11: note = source = /note="Description of Artificial Sequence: Synthetic peptide"
AVWDDIGRVLQ

SEQ ID NO: 1117 - protein, 121 aa, synthetic construct
  REGION 1..121: note = source = /note="Description of Artificial Sequence: Synthetic polypeptide"
EVQLVESGGGLVQPGGSLRLSCAASGFTFSRYWMSWVRQAPGKGLEWVANIKQDGSEKYYVDSVKGRFTISRDNAKNSLYLQMNSLRAEDTAVYYCAREGGWFGELAFDYWGQGTLVTVSS

SEQ ID NO: 1118 - protein, 5 aa, synthetic construct
  REGION 1..5: note = source = /note="Description of Artificial Sequence: Synthetic peptide"
RYWMS

SEQ ID NO: 1119 - protein, 17 aa, synthetic construct
  REGION 1..17: note = source = /note="Description of Artificial Sequence: Synthetic peptide"
NIKQDGSEKYYVDSVKG

SEQ ID NO: 1120 - protein, 11 aa, synthetic construct
  REGION 1..11: note = source = /note="Description of Artificial Sequence: Synthetic peptide"
EGGWFGELAFD

SEQ ID NO: 1121 - protein, 108 aa, synthetic construct
  REGION 1..108: note = source = /note="Description of Artificial Sequence: Synthetic polypeptide"
EIVLTQSPGTLSLSPGERATLSCRASQRVSSSYLAWYQQKPGQAPRLLIYDASSRATGIPDRFSGSGSGTDFTLTISRLEPEDFAVYYCQQYGSLPWTFGQGTKVEIK

SEQ ID NO: 1122 - protein, 12 aa, synthetic construct
  REGION 1..12: note = source = /note="Description of Artificial Sequence: Synthetic peptide"
RASQRVSSSYLA

SEQ ID NO: 1123 - protein, 7 aa, synthetic construct
  REGION 1..7: note = source = /note="Description of Artificial Sequence: Synthetic peptide"
DASSRAT

SEQ ID NO: 1124 - protein, 9 aa, synthetic construct
  REGION 1..9: note = source = /note="Description of Artificial Sequence: Synthetic peptide"
QQYGSLPWT

SEQ ID NO: 1125 - protein, 447 aa, synthetic construct
  REGION 1..447: note = source = /note="Description of Artificial Sequence: Synthetic polypeptide"
EVQLVESGGGLVQPGGSLRLSCAASGFTFSDSWIHWVRQAPGKGLEWVAWISPYGGSTYYADSVKGRFTISADTSKNTAYLQMNSLRAEDTAVYYCARRHWPGGFDYWGQGTLVTVSAASTKGPSVFPLAPSSKSTSGGTAALGCLVKDYFPEPVTVSWNSGALTSGVHTFPAVLQSSGLYSLSSVVTVPSSSLGTQTYICNVNHKPSNTKVDKKVEPKSCDKTHTCPPCPAPELLGGPSVFLFPPKPKDTLMISRTPEVTCVVVDVSHEDPEVKFNWYVDGVEVHNAKTKPREEQYASTYRVVSVLTVLHQDWLNGKEYKCKVSNKALPAPIEKTISKAKGQPREPQVYTLPPSRDELTKNQVSLTCLVKGFYPSDIAVEWESNGQPENNYKTTPPVLDSDGSFFLYSKLTVDKSRWQQGNVFSCSVMHEALHNHYTQKSLSLSPG

SEQ ID NO: 1126 - protein, 214 aa, synthetic construct
  REGION 1..214: note = source = /note="Description of Artificial Sequence: Synthetic polypeptide"
DIQMTQSPSSLSASVGDRVTITCRASQDVSTAVAWYQQKPGKAPKLLIYSASFLYSGVPSRFSGSGSGTDFTLTISSLQPEDFATYYCQQYLFTPPTFGQGTKVEIKRTVAAPSVFIFPPSDEQLKSGTASVVCLLNNFYPREAKVQWKVDNALQSGNSQESVTEQDSKDSTYSLSSTLTLSKADYEKHKVYACEVTHQGLSSPVTKSFNRGEC

SEQ ID NO: 1127 - protein, 118 aa, synthetic construct
  REGION 1..118: note = source = /note="Description of Artificial Sequence: Synthetic polypeptide"
EVQLVESGGGLVQPGGSLRLSCAASGFTFSDSWIHWVRQAPGKGLEWVAWISPYGGSTYYADSVKGRFTISADTSKNTAYLQMNSLRAEDTAVYYCARRHWPGGFDYWGQGTLVTVSA

SEQ ID NO: 1128 - protein, 10 aa, synthetic construct
  REGION 1..10: note = source = /note="Description of Artificial Sequence: Synthetic peptide"
GFTFSDSWIH

SEQ ID NO: 1129 - protein, 18 aa, synthetic construct
  REGION 1..18: note = source = /note="Description of Artificial Sequence: Synthetic peptide"
AWISPYGGSTYYADSVKG

SEQ ID NO: 1130 - protein, 9 aa, synthetic construct
  REGION 1..9: note = source = /note="Description of Artificial Sequence: Synthetic peptide"
RHWPGGFDY

SEQ ID NO: 1131 - protein, 108 aa, synthetic construct
  REGION 1..108: note = source = /note="Description of Artificial Sequence: Synthetic polypeptide"
DIQMTQSPSSLSASVGDRVTITCRASQDVSTAVAWYQQKPGKAPKLLIYSASFLYSGVPSRFSGSGSGTDFTLTISSLQPEDFATYYCQQYLYHPATFGQGTKVEIKR

SEQ ID NO: 1132 - protein, 11 aa, synthetic construct
  REGION 1..11: note = source = /note="Description of Artificial Sequence: Synthetic peptide"
RASQDVSTAVA

SEQ ID NO: 1133 - protein, 7 aa, synthetic construct
  REGION 1..7: note = source = /note="Description of Artificial Sequence: Synthetic peptide"
SASFLYS

SEQ ID NO: 1134 - protein, 9 aa, synthetic construct
  REGION 1..9: note = source = /note="Description of Artificial Sequence: Synthetic peptide"
QQYLYHPAT

SEQ ID NO: 1135 - protein, 122 aa, synthetic construct
  REGION 1..122: note = source = /note="Description of Artificial Sequence: Synthetic polypeptide"
EVQLVESGGGLVQPGGSLRLSCAASGFTFSDSWIHWVRQAPGKGLEWVAWISPYGGSTYYADSVKGRFTISADTSKNTAYLQMNSLRAEDTAVYYCARRHWPGGFDYWGQGTLVTVSSASTK

SEQ ID NO: 1136 - protein, 108 aa, synthetic construct; identical to SEQ ID NO: 1131
  REGION 1..108: note = source = /note="Description of Artificial Sequence: Synthetic polypeptide"

SEQ ID NO: 1137 - protein, 118 aa, synthetic construct [sequence omitted]

SEQ ID NO: 1138 - protein, 108 aa, synthetic construct; identical to SEQ ID NO: 1131
  REGION 1..108: note = source = /note="Description of Artificial Sequence: Synthetic polypeptide"

SEQ ID NO: 1139 - protein, 118 aa, synthetic construct
  REGION 1..118: note = source = /note="Description of Artificial Sequence: Synthetic polypeptide"
EVQLVESCGGLVQPGGSLRLSCAASGFTFSDSWIHWVRQAPGKGLEWVAWISPYGGSTYYADSVKGRFTISRDTSKNTAYLQMNSLRAEDTAVYYCARRHWPGGFDYWGQGTLVTVSA

SEQ ID NO: 1140 - protein, 118 aa, synthetic construct
  REGION 1..118: note = source = /note="Description of Artificial Sequence: Synthetic polypeptide"
EVQLVESGGGLVQPGGSLRLSCAASGFTFSDSWIHWVRQAPGKGLEWVAWISPYGGSTYYADSVKGRFTISRDTSKNTAYLQMNSLRAEDTAVYYCARRHWPGGFDYWGQGTLVTVSA

SEQ ID NO: 1141 - protein, 118 aa, synthetic construct
  REGION 1..118: note = source = /note="Description of Artificial Sequence: Synthetic polypeptide"
EVQLVESGGGLVQPGGSLRLSCAASGFTFSGSWIHWVRQAPGKGLEWVAWILPYGGSSYYADSVKGRFTISRDTSKNTAYLQMNSLRAEDTAVYYCARRHWPGGFDYWGQGTLVTVSA

SEQ ID NO: 1142 - protein, 108 aa, synthetic construct; identical to SEQ ID NO: 1131
  REGION 1..108: note = source = /note="Description of Artificial Sequence: Synthetic polypeptide"

SEQ ID NO: 1143 - protein, 108 aa, synthetic construct
  REGION 1..108: note = source = /note="Description of Artificial Sequence: Synthetic polypeptide"
DIQMTQSPSSLSASVGDRVTITCRASQDVSTAVAWYQQKPGKAPKLLIYSASFLYSGVPSRFSGSGSGTDFTLTISSLQPEDFATYYCQQYYNVPWTFGQGTKVEIKR

SEQ ID NO: 1144 - protein, 108 aa, synthetic construct
  REGION 1..108: note = source = /note="Description of Artificial Sequence: Synthetic polypeptide"
DIQMTQSPSSLSASVGDRVTITCRASQDVSTAVAWYQQKPGKAPKLLIYSASFLYSGVPSRFSGSGSGTDFTLTISSLQPEDFATYYCQQYYAPPWTFGQGTKVEIKR

SEQ ID NO: 1145 - protein, 108 aa, synthetic construct
  REGION 1..108: note = source = /note="Description of Artificial Sequence: Synthetic polypeptide"
DIQMTQSPSSLSASVGDRVTITCRASQDVSTAVAWYQQKPGKAPKLLIYSASFLYSGVPSRFSGSGSGTDFTLTISSLQPEDFATYYCQQYYTVPWTFGQGTKVEIKR

SEQ ID NO: 1146 - protein, 108 aa, synthetic construct
  REGION 1..108: note = source = /note="Description of Artificial Sequence: Synthetic polypeptide"
DIQMTQSPSSLSASVGDRVTITCRASQVINTFLAWYQQKPGKAPKLLIYSASTLASGVPSRFSGSGSGTDFTLTISSLQPEDFATYYCQQYYTVPRTFGQGTKVEIKR

SEQ ID NO: 1147 - protein, 108 aa, synthetic construct
  REGION 1..108: note = source = /note="Description of Artificial Sequence: Synthetic polypeptide"
DIQMTQSPSSLSASVGDRVTITCRASQDVSTAVAWYQQKPGKAPKLLIYSASFLYSGVPSRFSGSGSGTDFTLTISSLQPEDFATYYCQQGYGVPRTFGQGTKVEIKR

SEQ ID NO: 1148 - protein, 108 aa, synthetic construct
  REGION 1..108: note = source = /note="Description of Artificial Sequence: Synthetic polypeptide"
DIQMTQSPSSLSASVGDRVTITCRASQDVSTAVAWYQQKPGKAPKLLIYSASFLYSGVPSRFSGSGSGTDFTLTISSLQPEDFATYYCQQYLFTPPTFGQGTKVEIKR

SEQ ID NO: 1149 - protein, 108 aa, synthetic construct
  REGION 1..108: note = source = /note="Description of Artificial Sequence: Synthetic polypeptide"
DIQMTQSPSSLSASVGDRVTITCRASQDVSTAVAWYQQKPGKAPKLLIYSASFLYSGVPSRFSGSGSGTDFTLTISSLQPEDFATYYCQQYFITPTTFGQGTKVEIKR

SEQ ID NO: 1150 - protein, 107 aa, synthetic construct
  REGION 1..107: note = source = /note="Description of Artificial Sequence: Synthetic polypeptide"
DIQMTQSPSSLSASVGDRVTITCRASQDVSTAVAWYQQKPGKAPKLLIYSASFLYSGVPSRFSGSGSGTDFTLTISSLQPEDFATYYCQQYYTPPTFGQGTKVEIKR

SEQ ID NO: 1151 - protein, 108 aa, synthetic construct
  REGION 1..108: note = source = /note="Description of Artificial Sequence: Synthetic polypeptide"
DIQMTQSPSSLSASVGDRVTITCRASQDVSTAVAWYQQKPGKAPKLLIYSASFLYSGVPSRFSGSGSGTDFTLTISSLQPEDFATYYCQQFFYTPPTFGQGTKVEIKR

SEQ ID NO: 1152 - protein, 108 aa, synthetic construct
  REGION 1..108: note = source = /note="Description of Artificial Sequence: Synthetic polypeptide"
DIQMTQSPSSLSASVGDRVTITCRASQDVSTAVAWYQQKPGKAPKLLIYSASFLYSGVPSRFSGSGSGTDFTLTISSLQPEDFATYYCQQSLFTPPTFGQGTKVEIKR

SEQ ID NO: 1153 - protein, 108 aa, synthetic construct
  REGION 1..108: note = source = /note="Description of Artificial Sequence: Synthetic polypeptide"
DIQMTQSPSSLSASVGDRVTITCRASQDVSTAVAWYQQKPGKAPKLLIYSASFLYSGVPSRFSGSGSGTDFTLTISSLQPEDFATYYCQQSLYTPPTFGQGTKVEIKR

SEQ ID NO: 1154 - protein, 108 aa, synthetic construct
  REGION 1..108: note = source = /note="Description of Artificial Sequence: Synthetic polypeptide"
DIQMTQSPSSLSASVGDRVTITCRASQDVSTAVAWYQQKPGKAPKLLIYSASFLYSGVPSRFSGSGSGTDFTLTISSLQPEDFATYYCQQSWYHPPTFGQGTKVEIKR

SEQ ID NO: 1155 - protein, 108 aa, synthetic construct
  REGION 1..108: note = source = /note="Description of Artificial Sequence: Synthetic polypeptide"
DIQMTQSPSSLSASVGDRVTITCRASQDVSTAVAWYQQKPGKAPKLLIYSASFLYSGVPSRFSGSGSGTDFTLTISSLQPEDFATYYCQQYFYIPPTFGQGTKVEIKR

SEQ ID NO: 1156 - protein, 108 aa, synthetic construct
  REGION 1..108: note = source = /note="Description of Artificial Sequence: Synthetic polypeptide"
DIQMTQSPSSLSASVGDRVTITCRASQDVSTAVAWYQQKPGKAPKLLIYSASFLYSGVPSRFSGSGSGTDFTLTISSLQPEDFATYYCQQYWYTPYTFGQGTKVEIKR

SEQ ID NO: 1157 - protein, 108 aa, synthetic construct
  REGION 1..108: note = source = /note="Description of Artificial Sequence: Synthetic polypeptide"
DIQMTQSPSSLSASVGDRVTITCRASQDVSTAVAWYQQKPGKAPKLLIYSASFLYSGVPSRFSGSGSGTDFTLTISSLQPEDFATYYCQQSYFIPPTFGQGTKVEIKR

SEQ ID NO: 1158 - protein, 450 aa, synthetic construct
  REGION 1..450: note = source = /note="Description of Artificial Sequence: Synthetic polypeptide"
EVQLLESGGGLVQPGGSLRLSCAASGFTFSSYIMMWVRQAPGKGLEWVSSIYPSGGITFYADTVKGRFTISRDNSKNTLYLQMNSLRAEDTAVYYCARIKLGTVTTVDYWGQGTLVTVSSASTKGPSVFPLAPSSKSTSGGTAALGCLVKDYFPEPVTVSWNSGALTSGVHTFPAVLQSSGLYSLSSVVTVPSSSLGTQTYICNVNHKPSNTKVDKKVEPKSCDKTHTCPPCPAPELLGGPSVFLFPPKPKDTLMISRTPEVTCVVVDVSHEDPEVKFNWYVDGVEVHNAKTKPREEQYNSTYRVVSVLTVLHQDWLNGKEYKCKVSNKALPAPIEKTISKAKGQPREPQVYTLPPSRDELTKNQVSLTCLVKGFYPSDIAVEWESNGQPENNYKTTPPVLDSDGSFFLYSKLTVDKSRWQQGNVFSCSVMHEALHNHYTQKSLSLSPGK

SEQ ID NO: 1159 - protein, 216 aa, synthetic construct
  REGION 1..216: note = source = /note="Description of Artificial Sequence: Synthetic polypeptide"
QSALTQPASVSGSPGQSITISCTGTSSDVGGYNYVSWYQQHPGKAPKLMIYDVSNRPSGVSNRFSGSKSGNTASLTISGLQAEDEADYYCSSYTSSSTRVFGTGTKVTVLGQPKANPTVTLFPPSSEELQANKATLVCLISDFYPGAVTVAWKADGSPVKAGVETTKPSKQSNNKYAASSYLSLTPEQWKSHRSYSCQVTHEGSTVEKTVAPTECS

SEQ ID NO: 1160 - protein, 118 aa, synthetic construct; identical to SEQ ID NO: 1127
  REGION 1..118: note = source = /note="Description of Artificial Sequence: Synthetic polypeptide"

SEQ ID NO: 1161 - protein, 106 aa, synthetic construct
  REGION 1..106: note = source = /note="Description of Artificial Sequence: Synthetic polypeptide"
DIQMTQSPSSLSASVGDRVTITCRASQDVSTAVAWYQQKPGKAPKWYSASFLYSGVPSRFSGSGSGTDFTLTISSLQPEDFATYYCQQYLYHPATFGQGTKVEIKR

SEQ ID NO: 1162 - protein, 448 aa, synthetic construct
  REGION 1..448: note = source = /note="Description of Artificial Sequence: Synthetic polypeptide"
EVQLVESGGGLVQPGGSLRLSCAASGFTFSDSWIHWVRQAPGKGLEWVAWISPYGGSTYYADSVKGRFTISADTSKNTAYLQMNSLRAEDTAVYYCARRHWPGGFDYWGQGTLVTVSSASTKGPSVFPLAPSSKSTSGGTAALGCLVKDYFPEPVTVSWNSGALTSGVHTFPAVLQSSGLYSLSSVVTVPSSSLGTQTYICNVNHKPSNTKVDKKVEPKSCDKTHTCPPCPAPELLGGPSVFLFPPKPKDTLMISRTPEVTCVVVDVSHEDPEVKFNWYVDGVEVHNAKTKPREEQYASTYRVVSVLTVLHQDWLNGKEYKCKVSNKALPAPIEKTISKAKGQPREPQVYTLPPSREEMTKNQVSLTCLVKGFYPSDIAVEWESNGQPENNYKTTPPVLDSDGSFFLYSKLTVDKSRWQQGNVFSCSVMHEALHNHYTQKSLSLSPGK

SEQ ID NO: 1163 - protein, 214 aa, synthetic construct
  REGION 1..214: note = source = /note="Description of Artificial Sequence: Synthetic polypeptide"
DIQMTQSPSSLSASVGDRVTITCRASQDVSTAVAWYQQKPGKAPKLLIYSASFLYSGVPSRFSGSGSGTDFTLTISSLQPEDFATYYCQQYLYHPATFGQGTKVEIKRTVAAPSVFIFPPSDEQLKSGTASVVCLLNNFYPREAKVQWKVDNALQSGNSQESVTEQDSKDSTYSLSSTLTLSKADYEKHKVYACEVTHQGLSSPVTKSFNRGEC

SEQ ID NO: 1164 - protein, 120 aa, synthetic construct
  REGION 1..120: note = source = /note="Description of Artificial Sequence: Synthetic polypeptide"
QMQLVQSGAEVKKPGSSVKVSCKASGGTFSSYAISWVRQAPGQGLEWMGGIIPIFGTANYAQKFQGRVTITADESTSTAYMELSSLRSEDTAVYYCAREEVSSPYGMDVWGQGTTVTVSS

SEQ ID NO: 1165 - protein, 8 aa, synthetic construct
  REGION 1..8: note = source = /note="Description of Artificial Sequence: Synthetic peptide"
GGTFSSYA

SEQ ID NO: 1166 - protein, 8 aa, synthetic construct
  REGION 1..8: note = source = /note="Description of Artificial Sequence: Synthetic peptide"
IIPIFGTA

SEQ ID NO: 1167 - protein, 13 aa, synthetic construct
  REGION 1..13: note = source = /note="Description of Artificial Sequence: Synthetic peptide"
AREEVSSPYGMDV

SEQ ID NO: 1168 - protein, 450 aa, synthetic construct
  REGION 1..450: note = source = /note="Description of Artificial Sequence: Synthetic polypeptide"
QMQLVQSGAEVKKPGSSVKVSCKASGGTFSSYAISWVRQAPGQGLEWMGGIIPIFGTANYAQKFQGRVTITADESTSTAYMELSSLRSEDTAVYYCAREEVSSPYGMDVWGQGTTVTVSSASTKGPSVFPLAPSSKSTSGGTAALGCLVKDYFPEPVTVSWNSGALTSGVHTFPAVLQSSGLYSLSSVVTVPSSSLGTQTYICNVNHKPSNTKVDKKVEPKSCDKTHTCPPCPAPELLGGPSVFLFPPKPKDTLMISRTPEVTCVVVDVSHEDPEVKFNWYVDGVEVHNAKTKPREEQYNSTYRVVSVLTVLHQDWLNGKEYKCKVSNKALPAPIEKTISKAKGQPREPQVYTLPPSREEMTKNQVSLTCLVKGFYPSDIAVEWESNGQPENNYKTTPPVLDSDGSFFLYSKLTVDKSRWQQGNVFSCSVMHEALHNHYTQKSLSLSPGK

SEQ ID NO: 1169 - protein, 111 aa, synthetic construct
  REGION 1..111: note = source = /note="Description of Artificial Sequence: Synthetic polypeptide"
QAVVTQEPSLTVSPGGTVTLTCGTSTGAVTSGHYPYWFQQKPGQAPKTLIYDTGNKHSWTPARFSGSLLGGKAALTLSGAQPEDEADYYCLLSYSGASWVFGGGTKLTVLG

SEQ ID NO: 1170 - protein, 9 aa, synthetic construct
  REGION 1..9: note = source = /note="Description of Artificial Sequence: Synthetic peptide"
TGAVTSGHY

SEQ ID NO: 1171 - skipped

SEQ ID NO: 1172 - protein, 10 aa, synthetic construct
  REGION 1..10: note = source = /note="Description of Artificial Sequence: Synthetic peptide"
LLSYSGASWV

SEQ ID NO: 1173 - protein, 216 aa, synthetic construct
  REGION 1..216: note = source = /note="Description of Artificial Sequence: Synthetic polypeptide"
QAVVTQEPSLTVSPGGTVTLTCGTSTGAVTSGHYPYWFQQKPGQAPKTLIYDTGNKHSWTPARFSGSLLGGKAALTLSGAQPEDEADYYCLLSYSGASWVFGGGTKLTVLGQPKAAPSVTLFPPSSEELQANKATLVCLISDFYPGAVTVAWKADSSPVKAGVETTTPSKQSNNKYAASSYLSLTPEQWKSHRSYSCQVTHEGSTVEKTVAPTECS

SEQ ID NO: 1174 - protein, 121 aa, synthetic construct
  REGION 1..121: note = source = /note="Description of Artificial Sequence: Synthetic polypeptide"
QVQLVQSGAEVKKPGASVKVSCKVSGFSLSHFSMHWVRQVPGKGLEWLGGFDPEEGGTIPAQKFQGRLTMTEDTSTETAYMELSSLRSEDTAVYYCATGIWYSSGWPVDYWGPGTLVTVSS

SEQ ID NO: 1175 - protein, 8 aa, synthetic construct
  REGION 1..8: note = source = /note="Description of Artificial Sequence: Synthetic peptide"
GFSLSHFS

SEQ ID NO: 1176 - protein, 8 aa, synthetic construct
  REGION 1..8: note = source = /note="Description of Artificial Sequence: Synthetic peptide"
FDPEEGGT

SEQ ID NO: 1177 - protein, 14 aa, synthetic construct
  REGION 1..14: note = source = /note="Description of Artificial Sequence: Synthetic peptide"
ATGIWYSSGWPVDY

SEQ ID NO: 1178 - protein, 458 aa, synthetic construct
  REGION 1..458: note = source = /note="Description of Artificial Sequence: Synthetic polypeptide"
EVQLVQSGAEVKKPGSSVKVSCKASGGTFSSYAISWVRQAPGQGLEWMGGIIPIFGTANYAQKFQGRVTITADKSTSTAYMELSSLRSEDTAVYYCARGPWYYDSSGYSSYAYYMDVWGQGTTVTVSSASTKGPSVFPLAPSSKSTSGGTAALGCLVKDYFPEPVTVSWNSGALTSGVHTFPAVLQSSGLYSLSSVVTVPSSSLGTQTYICNVNHKPSNTKVDKKVEPKSCDKTHTCPPCPAPELLGGPSVFLFPPKPKDTLMISRTPEVTCVVVDVSHEDPEVKFNWYVDGVEVHNAKTKPREEQYNSTYRVVSVLTVLHQDWLNGKEYKCKVSNKALPAPIEKTISKAKGQPREPQVYTLPPSREEMTKNQVSLTCLVKGFYPSDIAVEWESNGQPENNYKTTPPVLDSDGSFFLYSKLTVDKSRWQQGNVFSCSVMHEALHNHYTQKSLSLSPGK

SEQ ID NO: 1179 - protein, 113 aa, synthetic construct
  REGION 1..113: note = source = /note="Description of Artificial Sequence: Synthetic polypeptide"
DVVMTQSPLSLPVTPGGPASISCRSSQSLLDSSGYNYVDWYLQKPGQSPQLLISLGSDRASGVPDRFSGSGSGTDFTLKISRVEAEDVGIYYCMQALQTPITFGQGTRLEIKR

SEQ ID NO: 1180 - protein, 11 aa, synthetic construct
  REGION 1..11: note = source = /note="Description of Artificial Sequence: Synthetic peptide"
QSLLDSSGYNY

SEQ ID NO: 1181 - skipped

SEQ ID NO: 1182 - protein, 9 aa, synthetic construct
  REGION 1..9: note = source = /note="Description of Artificial Sequence: Synthetic peptide"
MQALQTPIT

SEQ ID NO: 1183 - protein, 219 aa, synthetic construct
  REGION 1..219: note = source = /note="Description of Artificial Sequence: Synthetic polypeptide"
DVVMTQSPLSLPVTPGGPASISCRSSQSLLDSSGYNYVDWYLQKPGQSPQLLISLGSDRASGVPDRFSGSGSGTDFTLKISRVEAEDVGIYYCMQALQTPITFGQGTRLEIKRTVAAPSVFIFPPSDEQLKSGTASVVCLLNNFYPREAKVQWKVDNALQSGNSQESVTEQDSKDSTYSLSSTLTLSKADYEKHKVYACEVTHQGLSSPVTKSFNRGEC

SEQ ID NO: 1184 - protein, 125 aa, synthetic construct
  REGION 1..125: note = source = /note="Description of Artificial Sequence: Synthetic polypeptide"
EVQLVQSGAEVKKPGASVKVSCKVSGYTLTELSMHWVRQAPGKGLEWMGGFDPEDGETIYAQKFQGRVTMTEDTSTDTAYMELSSLRSEDTAVYYCATVSRVRGVINYYYYMDVWGKGTTVTVSS

SEQ ID NO: 1185 - protein, 8 aa, synthetic construct
  REGION 1..8: note = source = /note="Description of Artificial Sequence: Synthetic peptide"
GYTLTELS

SEQ ID NO: 1186 - protein, 8 aa, synthetic construct
  REGION 1..8: note = source = /note="Description of Artificial Sequence: Synthetic peptide"
FDPEDGET

SEQ ID NO: 1187 - protein, 18 aa, synthetic construct
  REGION 1..18: note = source = /note="Description of Artificial Sequence: Synthetic peptide"
ATVSRVRGVINYYYYMDV

SEQ ID NO: 1188 - protein, 455 aa, synthetic construct
  REGION 1..455: note = source = /note="Description of Artificial Sequence: Synthetic polypeptide"
EVQLVQSGAEVKKPGASVKVSCKVSGYTLTELSMHWVRQAPGKGLEWMGGFDPEDGETIYAQKFQGRVTMTEDTSTDTAYMELSSLRSEDTAVYYCATVSRVRGVINYYYYMDVWGKGTTVTVSSASTKGPSVFPLAPSSKSTSGGTAALGCLVKDYFPEPVTVSWNSGALTSGVHTFPAVLQSSGLYSLSSVVTVPSSSLGTQTYICNVNHKPSNTKVDKKVEPKSCDKTHTCPPCPAPELLGGPSVFLFPPKPKDTLMISRTPEVTCVVVDVSHEDPEVKFNWYVDGVEVHNAKTKPREEQYNSTYRVVSVLTVLHQDWLNGKEYKCKVSNKALPAPIEKTISKAKGQPREPQVYTLPPSREEMTKNQVSLTCLVKGFYPSDIAVEWESNGQPENNYKTTPPVLDSDGSFFLYSKLTVDKSRWQQGNVFSCSVMHEALHNHYTQKSLSLSPGK

SEQ ID NO: 1189 - protein, 113 aa, synthetic construct
  REGION 1..113: note = source = /note="Description of Artificial Sequence: Synthetic polypeptide"
DVVMTQSPLSLPVTPGEPASISCRSSQSLLYRNGNNYLDWYLQKPGQSPQLLIYLGSNRASGVPDRFSGSGSGTDFTLKISRVEAEDVGVYYCMQALQTPPTFGGGTKLEIKR

SEQ ID NO: 1190 - protein, 11 aa, synthetic construct
  REGION 1..11: note = source = /note="Description of Artificial Sequence: Synthetic peptide"
QSLLYRNGNNY

SEQ ID NO: 1191 - skipped

SEQ ID NO: 1192 - protein, 9 aa, synthetic construct
  REGION 1..9: note = source = /note="Description of Artificial Sequence: Synthetic peptide"
MQALQTPPT

SEQ ID NO: 1193 - protein, 219 aa, synthetic construct
  REGION 1..219: note = source = /note="Description of Artificial Sequence: Synthetic polypeptide"
DVVMTQSPLSLPVTPGEPASISCRSSQSLLYRNGNNYLDWYLQKPGQSPQLLIYLGSNRASGVPDRFSGSGSGTDFTLKISRVEAEDVGVYYCMQALQTPPTFGGGTKLEIKRTVAAPSVFIFPPSDEQLKSGTASVVCLLNNFYPREAKVQWKVDNALQSGNSQESVTEQDSKDSTYSLSSTLTLSKADYEKHKVYACEVTHQGLSSPVTKSFNRGEC

SEQ ID NO: 1194 - protein, 120 aa, synthetic construct
  REGION 1..120: note = source = /note="Description of Artificial Sequence: Synthetic polypeptide"
QVQLVQSGAEVRRPGSSVRVSCKPSGGTFGTYAFTWVRQAPGQGLEWMGGITPISATINRAQNLQDRLTITADESTTTVHMDLTSLRSEDTAVYYCARGFEYSDGLLDDWGQGTLVTVSS

SEQ ID NO: 1195 - protein, 8 aa, synthetic construct
  REGION 1..8: note = source = /note="Description of Artificial Sequence: Synthetic peptide"
GGTFGTYA

SEQ ID NO: 1196 - protein, 8 aa, synthetic construct
  REGION 1..8: note = source = /note="Description of Artificial Sequence: Synthetic peptide"
ITPISATI

SEQ ID NO: 1197 - protein, 13 aa, synthetic construct
  REGION 1..13: note = source = /note="Description of Artificial Sequence: Synthetic peptide"
ARGFEYSDGLLDD

SEQ ID NO: 1198 - protein, 450 aa, synthetic construct
  REGION 1..450: note = source = /note="Description of Artificial Sequence: Synthetic polypeptide"
QVQLVQSGAEVRRPGSSVRVSCKPSGGTFGTYAFTWVRQAPGQGLEWMGGITPISATINRAQNLQDRLTITADESTTTVHMDLTSLRSEDTAVYYCARGFEYSDGLLDDWGQGTLVTVSSASTKGPSVFPLAPSSKSTSGGTAALGCLVKDYFPEPVTVSWNSGALTSGVHTFPAVLQSSGLYSLSSVVTVPSSSLGTQTYICNVNHKPSNTKVDKKVEPKSCDKTHTCPPCPAPELLGGPSVFLFPPKPKDTLMISRTPEVTCVVVDVSHEDPEVKFNWYVDGVEVHNAKTKPREEQYNSTYRVVSVLTVLHQDWLNGKEYKCKVSNKALPAPIEKTISKAKGQPREPQVYTLPPSREEMTKNQVSLTCLVKGFYPSDIAVEWESNGQPENNYKTTPPVLDSDGSFFLYSKLTVDKSRWQQGNVFSCSVMHEALHNHYTQKSLSLSPGK

SEQ ID NO: 1199 - protein, 114 aa, synthetic construct
  REGION 1..114: note = source = /note="Description of Artificial Sequence: Synthetic polypeptide"
DIVMTQTPLSLPVIPGEPASISCRSSQSLFYSDDGNTYLDWYLQKPGQSPQLLIYRLSHRASGVPDRFSGSGSGTDFTLKISRVEAEDVGVYYCMQHMEFPLTFGGGTKVEIKR

SEQ ID NO: 1200 - protein, 12 aa, synthetic construct
  REGION 1..12: note = source = /note="Description of Artificial Sequence: Synthetic peptide"
QSLFYSDDGNTY

SEQ ID NO: 1201 - skipped

SEQ ID NO: 1202 - protein, 9 aa, synthetic construct
  REGION 1..9: note = source = /note="Description of Artificial Sequence: Synthetic peptide"
MQHMEFPLT

SEQ ID NO: 1203 - protein, 220 aa, synthetic construct
  REGION 1..220: note = source = /note="Description of Artificial Sequence: Synthetic polypeptide"
DIVMTQTPLSLPVIPGEPASISCRSSQSLFYSDDGNTYLDWYLQKPGQSPQLLIYRLSHRASGVPDRFSGSGSGTDFTLKISRVEAEDVGVYYCMQHMEFPLTFGGGTKVEIKRTVAAPSVFIFPPSDEQLKSGTASVVCLLNNFYPREAKVQWKVDNALQSGNSQESVTEQDSKDSTYSLSSTLTLSKADYEKHKVYACEVTHQGLSSPVTKSFNRGEC

SEQ ID NO: 1204 - protein, 117 aa, synthetic construct
  REGION 1..117: note = source = /note="Description of Artificial Sequence: Synthetic polypeptide"
QVQLQESGPGLVKPSGTLSLTCVVSSGSISSTNWWTWVRQPPGKGLEWIGEIYHSGSTSYNSSLKSRVTISEDKSKNQISLRLSSVTAADTAVYYCARVGPAAIYYWGQGTLVTVSS

SEQ ID NO: 1205 - protein, 9 aa, synthetic construct
  REGION 1..9: note = source = /note="Description of Artificial Sequence: Synthetic peptide"
SGSISSTNW

SEQ ID NO: 1206 - protein, 7 aa, synthetic construct
  REGION 1..7: note = source = /note="Description of Artificial Sequence: Synthetic peptide"
IYHSGST

SEQ ID NO: 1207 - protein, 10 aa, synthetic construct
  REGION 1..10: note = source = /note="Description of Artificial Sequence: Synthetic peptide"
ARVGPAAIYY

SEQ ID NO: 1208 - protein, 447 aa, synthetic construct
  REGION 1..447: note = source = /note="Description of Artificial Sequence: Synthetic polypeptide"
QVQLQESGPGLVKPSGTLSLTCVVSSGSISSTNWWTWVRQPPGKGLEWIGEIYHSGSTSYNSSLKSRVTISEDKSKNQISLRLSSVTAADTAVYYCARVGPAAIYYWGQGTLVTVSSASTKGPSVFPLAPSSKSTSGGTAALGCLVKDYFPEPVTVSWNSGALTSGVHTFPAVLQSSGLYSLSSVVTVPSSSLGTQTYICNVNHKPSNTKVDKKVEPKSCDKTHTCPPCPAPELLGGPSVFLFPPKPKDTLMISRTPEVTCVVVDVSHEDPEVKFNWYVDGVEVHNAKTKPREEQYNSTYRVVSVLTVLHQDWLNGKEYKCKVSNKALPAPIEKTISKAKGQPREPQVYTLPPSREEMTKNQVSLTCLVKGFYPSDIAVEWESNGQPENNYKTTPPVLDSDGSFFLYSKLTVDKSRWQQGNVFSCSVMHEALHNHYTQKSLSLSPGK

SEQ ID NO: 1209 - protein, 111 aa, synthetic construct
  REGION 1..111: note = source = /note="Description of Artificial Sequence: Synthetic polypeptide"
QAGLTQPPSVSKGLRQTATLTCTGNSNNVGYEGAAWLQQHQGHAPKLLLYRNNNRPSGISKRFSASRSGNTASLTITGLQPEDEADYYCSAWDSSLNAVVFGGGTQLTVLG

SEQ ID NO: 1210 - protein, 8 aa, synthetic construct
  REGION 1..8: note = source = /note="Description of Artificial Sequence: Synthetic peptide"
SNNVGYEG

SEQ ID NO: 1211 - skipped

SEQ ID NO: 1212 - protein, 11 aa, synthetic construct
  REGION 1..11: note = source = /note="Description of Artificial Sequence: Synthetic peptide"
SAWDSSLNAVV

SEQ ID NO: 1213 - protein, 216 aa, synthetic construct
  REGION 1..216: note = source = /note="Description of Artificial Sequence: Synthetic polypeptide"
QAGLTQPPSVSKGLRQTATLTCTGNSNNVGYEGAAWLQQHQGHAPKLLLYRNNNRPSGISKRFSASRSGNTASLTITGLQPEDEADYYCSAWDSSLNAVVFGGGTQLTVLGQPKAAPSVTLFPPSSEELQANKATLVCLISDFYPGAVTVAWKADSSPVKAGVETTTPSKQSNNKYAASSYLSLTPEQWKSHRSYSCQVTHEGSTVEKTVAPTECS

SEQ ID NO: 1214 - protein, 128 aa, synthetic construct
  REGION 1..128: note = source = /note="Description of Artificial Sequence: Synthetic polypeptide"
EVQLVQSGAEVKKPGASVKVSCKVSGYTLTELSMHWVRQAPGKGLEWMGGFDPEDGETIYAQKFQGRVTMTEDTSTDTAYMELSSLRSEDTAVYYCATAKPGIAVAGQNYYYYYMDVWGKGTTVTVSS

SEQ ID NO: 1215 - protein, 8 aa, synthetic construct
  REGION 1..8: note = source = /note="Description of Artificial Sequence: Synthetic peptide"
GYTLTELS

SEQ ID NO: 1216 - protein, 8 aa, synthetic construct
  REGION 1..8: note = source = /note="Description of Artificial Sequence: Synthetic peptide"
FDPEDGET

SEQ ID NO: 1217 - protein, 21 aa, synthetic construct
  REGION 1..21: note = source = /note="Description of Artificial Sequence: Synthetic peptide"
ATAKPGIAVAGQNYYYYYMDV

SEQ ID NO: 1218 - protein, 458 aa, synthetic construct
  REGION 1..458: note = source = /note="Description of Artificial Sequence: Synthetic polypeptide"
EVQLVQSGAEVKKPGASVKVSCKVSGYTLTELSMHWVRQAPGKGLEWMGGFDPEDGETIYAQKFQGRVTMTEDTSTDTAYMELSSLRSEDTAVYYCATAKPGIAVAGQNYYYYYMDVWGKGTTVTVSSASTKGPSVFPLAPSSKSTSGGTAALGCLVKDYFPEPVTVSWNSGALTSGVHTFPAVLQSSGLYSLSSVVTVPSSSLGTQTYICNVNHKPSNTKVDKKVEPKSCDKTHTCPPCPAPELLGGPSVFLFPPKPKDTLMISRTPEVTCVVVDVSHEDPEVKFNWYVDGVEVHNAKTKPREEQYNSTYRVVSVLTVLHQDWLNGKEYKCKVSNKALPAPIEKTISKAKGQPREPQVYTLPPSREEMTKNQVSLTCLVKGFYPSDIAVEWESNGQPENNYKTTPPVLDSDGSFFLYSKLTVDKSRWQQGNVFSCSVMHEALHNHYTQKSLSLSPGK

SEQ ID NO: 1219 - protein, 113 aa, synthetic construct; identical to SEQ ID NO: 1189
  REGION 1..113: note = source = /note="Description of Artificial Sequence: Synthetic polypeptide"

SEQ ID NO: 1220 - protein, 11 aa, synthetic construct
  REGION 1..11: note = source = /note="Description of Artificial Sequence: Synthetic peptide"
QSLLYRNGNNY

SEQ ID NO: 1221 - skipped

SEQ ID NO: 1222 - protein, 9 aa, synthetic construct
  REGION 1..9: note = source = /note="Description of Artificial Sequence: Synthetic peptide"
MQALQTPPT

SEQ ID NO: 1223 - protein, 219 aa, synthetic construct; identical to SEQ ID NO: 1193
  REGION 1..219: note = source = /note="Description of Artificial Sequence: Synthetic polypeptide"

SEQ ID NO: 1224 - protein, 124 aa, synthetic construct
  REGION 1..124: note = source = /note="Description of Artificial Sequence: Synthetic polypeptide"
EVQLVESGGGLVQPGRSLRLSCAASGFTFSSYAMHWVRQAPGKGLEWVAVISYDGSNKYYADSVKGRFTISRDNSKNTLYLQMNSLRAEDTAVYYCASSPIGYSYGYWGGMDVWGQGTTVTVSS

SEQ ID NO: 1225 - protein, 8 aa, synthetic construct
  REGION 1..8: note = source = /note="Description of Artificial Sequence: Synthetic peptide"
GFTFSSYA

SEQ ID NO: 1226 - protein, 8 aa, synthetic construct
  REGION 1..8: note = source = /note="Description of Artificial Sequence: Synthetic peptide"
ISYDGSNK

SEQ ID NO: 1227 - protein, 17 aa, synthetic construct
  REGION 1..17: note = source = /note="Description of Artificial Sequence: Synthetic peptide"
ASSPIGYSYGYWGGMDV

SEQ ID NO: 1228 - protein, 454 aa, synthetic construct
  REGION 1..454: note = source = /note="Description of Artificial Sequence: Synthetic polypeptide"
EVQLVESGGGLVQPGRSLRLSCAASGFTFSSYAMHWVRQAPGKGLEWVAVISYDGSNKYYADSVKGRFTISRDNSKNTLYLQMNSLRAEDTAVYYCASSPIGYSYGYWGGMDVWGQGTTVTVSSASTKGPSVFPLAPSSKSTSGGTAALGCLVKDYFPEPVTVSWNSGALTSGVHTFPAVLQSSGLYSLSSVVTVPSSSLGTQTYICNVNHKPSNTKVDKKVEPKSCDKTHTCPPCPAPELLGGPSVFLFPPKPKDTLMISRTPEVTCVVVDVSHEDPEVKFNWYVDGVEVHNAKTKPREEQYNSTYRVVSVLTVLHQDWLNGKEYKCKVSNKALPAPIEKTISKAKGQPREPQVYTLPPSREEMTKNQVSLTCLVKGFYPSDIAVEWESNGQPENNYKTTPPVLDSDGSFFLYSKLTVDKSRWQQGNVFSCSVMHEALHNHYTQKSLSLSPGK

SEQ ID NO: 1229 - protein, 116 aa, synthetic construct
  REGION 1..116: note = source = /note="Description of Artificial Sequence: Synthetic polypeptide"
QAVLTQPASLSASPGASASLTCTLRSGIDVRTNKIFWYQVKPGSPPQHLLTFQSDSDKQQGSGVPSRFSGSKDASANAGILIISGLQSEDEADYYCLIWHTSGWVFGGGTQLTVLG

SEQ ID NO: 1230 - protein, 9 aa, synthetic construct
  REGION 1..9: note = source = /note="Description of Artificial Sequence: Synthetic peptide"
SGIDVRTNK

SEQ ID NO: 1231 - protein, 7 aa, synthetic construct
  REGION 1..7: note = source = /note="Description of Artificial Sequence: Synthetic peptide"
FQSDSDK

SEQ ID NO: 1232 - protein, 9 aa, synthetic construct
  REGION 1..9: note = source = /note="Description of Artificial Sequence: Synthetic peptide"
LIWHTSGWV

SEQ ID NO: 1233 - protein, 221 aa, synthetic construct
  REGION 1..221: note = source = /note="Description of Artificial Sequence: Synthetic polypeptide"
QAVLTQPASLSASPGASASLTCTLRSGIDVRTNKIFWYQVKPGSPPQHLLTFQSDSDKQQGSGVPSRFSGSKDASANAGILIISGLQSEDEADYYCLIWHTSGWVFGGGTQLTVLGQPKAAPSVTLFPPSSEELQANKATLVCLISDFYPGAVTVAWKADSSPVKAGVETTTPSKQSNNKYAASSYLSLTPEQWKSHRSYSCQVTHEGSTVEKTVAPTECS

SEQ ID NO: 1234 - protein, 124 aa, synthetic construct
  REGION 1..124: note = source = /note="Description of Artificial Sequence: Synthetic polypeptide"
EVQLVQSGAEVKKPGASVKVSCKVSGYTLTELSMHWVRQAPGKGLEWMGGFDPEDGETIYAQKFQGRVTMTEDTSTDTAYMELSSLRSEDTAVYYCATGPAAAGVGYYYYMDVWGKGTTVTVSS

SEQ ID NO: 1235 - protein, 8 aa, synthetic construct
  REGION 1..8: note = source = /note="Description of Artificial Sequence: Synthetic peptide"
GYTLTELS

SEQ ID NO: 1236 - protein, 8 aa, synthetic construct
  REGION 1..8: note = source = /note="Description of Artificial Sequence: Synthetic peptide"
FDPEDGET

SEQ ID NO: 1237 - protein, 17 aa, synthetic construct
  REGION 1..17: note = source = /note="Description of Artificial Sequence: Synthetic peptide"
ATGPAAAGVGYYYYMDV

SEQ ID NO: 1238 - protein, 454 aa, synthetic construct
  REGION 1..454: note = source = /note="Description of Artificial Sequence: Synthetic polypeptide"
EVQLVQSGAEVKKPGASVKVSCKVSGYTLTELSMHWVRQAPGKGLEWMGGFDPEDGETIYAQKFQGRVTMTEDTSTDTAYMELSSLRSEDTAVYYCATGPAAAGVGYYYYMDVWGKGTTVTVSSASTKGPSVFPLAPSSKSTSGGTAALGCLVKDYFPEPVTVSWNSGALTSGVHTFPAVLQSSGLYSLSSVVTVPSSSLGTQTYICNVNHKPSNTKVDKKVEPKSCDKTHTCPPCPAPELLGGPSVFLFPPKPKDTLMISRTPEVTCVVVDVSHEDPEVKFNWYVDGVEVHNAKTKPREEQYNSTYRVVSVLTVLHQDWLNGKEYKCKVSNKALPAPIEKTISKAKGQPREPQVYTLPPSREEMTKNQVSLTCLVKGFYPSDIAVEWESNGQPENNYKTTPPVLDSDGSFFLYSKLTVDKSRWQQGNVFSCSVMHEALHNHYTQKSLSLSPGK

SEQ ID NO: 1239 - protein, 113 aa, synthetic construct
  REGION 1..113: note = source = /note="Description of Artificial Sequence: Synthetic polypeptide"
DVVMTQSPLSLPVTPGEPASISCRSSQSLLYRNGYNYLDWYLQKPGQSPQLLIYLGSNRASGVPDRFSGSGSGTDFTLKISRVEAEDVGVYYCMQALQTPPTFGQGTKVEIKR

SEQ ID NO: 1240 - protein, 11 aa, synthetic construct
  REGION 1..11: note = source = /note="Description of Artificial Sequence: Synthetic peptide"
QSLLYRNGYNY

SEQ ID NO: 1241 - skipped

SEQ ID NO: 1242 - protein, 9 aa, synthetic construct
  REGION 1..9: note = source = /note="Description of Artificial Sequence: Synthetic peptide"
MQALQTPPT

SEQ ID NO: 1243 - protein, 219 aa, synthetic construct
  REGION 1..219: note = source = /note="Description of Artificial Sequence: Synthetic polypeptide"
DVVMTQSPLSLPVTPGEPASISCRSSQSLLYRNGYNYLDWYLQKPGQSPQLLIYLGSNRASGVPDRFSGSGSGTDFTLKISRVEAEDVGVYYCMQALQTPPTFGQGTKVEIKRTVAAPSVFIFPPSDEQLKSGTASVVCLLNNFYPREAKVQWKVDNALQSGNSQESVTEQDSKDSTYSLSSTLTLSKADYEKHKVYACEVTHQGLSSPVTKSFNRGEC

SEQ ID NO: 1244 - protein, 127 aa, synthetic construct
  REGION 1..127: note = source = /note="Description of Artificial Sequence: Synthetic polypeptide"
EVQLVETGGGLIQPGRSLRLSCAASGFTFSSYAMHWVRQAPGKGLEWVAVISYDGSNKYYADSVKGRFTISRDNSKNTLYLQMNSLRAEDTAVYYCARDVMVYCSSTSCYFYGMDVWGQGTTVTVSS

SEQ ID NO: 1245 - protein, 8 aa, synthetic construct
  REGION 1..8: note = source = /note="Description of Artificial Sequence: Synthetic peptide"
GFTFSSYA

SEQ ID NO: 1246 - protein, 8 aa, synthetic construct
  REGION 1..8: note = source = /note="Description of Artificial Sequence: Synthetic peptide"
ISYDGSNK

SEQ ID NO: 1247 - protein, 20 aa, synthetic construct
  REGION 1..20: note = source = /note="Description of Artificial Sequence: Synthetic peptide"
ARDVMVYCSSTSCYFYGMDV

SEQ ID NO: 1248 - protein, 457 aa, synthetic construct
  REGION 1..457: note = source = /note="Description of Artificial Sequence: Synthetic polypeptide"
EVQLVETGGGLIQPGRSLRLSCAASGFTFSSYAMHWVRQAPGKGLEWVAVISYDGSNKYYADSVKGRFTISRDNSKNTLYLQMNSLRAEDTAVYYCARDVMVYCSSTSCYFYGMDVWGQGTTVTVSSASTKGPSVFPLAPSSKSTSGGTAALGCLVKDYFPEPVTVSWNSGALTSGVHTFPAVLQSSGLYSLSSVVTVPSSSLGTQTYICNVNHKPSNTKVDKKVEPKSCDKTHTCPPCPAPELLGGPSVFLFPPKPKDTLMISRTPEVTCVVVDVSHEDPEVKFNWYVDGVEVHNAKTKPREEQYNSTYRVVSVLTVLHQDWLNGKEYKCKVSNKALPAPIEKTISKAKGQPREPQVYTLPPSREEMTKNQVSLTCLVKGFYPSDIAVEWESNGQPENNYKTTPPVLDSDGSFFLYSKLTVDKSRWQQGNVFSCSVMHEALHNHYTQKSLSLSPGK

SEQ ID NO: 1249 - protein, 108 aa, synthetic construct
  REGION 1..108: note = source = /note="Description of Artificial Sequence: Synthetic polypeptide"
DIQMTQSPSSLSASVGDRVTVTCQASQDIRDYLNWYQKKPGKAPKLLIYDASNLEAGVPSRFSGSGSGTDFTFTISGLQPEDVATYYCQQFENLPITFGQGTRLEIKR

SEQ ID NO: 1250 - protein, 6 aa, synthetic construct
  REGION 1..6: note = source = /note="Description of Artificial Sequence: Synthetic peptide"
QDIRDY

SEQ ID NO: 1251 - skipped

SEQ ID NO: 1252 - protein, 9 aa, synthetic construct
  REGION 1..9: note = source = /note="Description of Artificial Sequence: Synthetic peptide"
QQFENLPIT

SEQ ID NO: 1253 - protein, 214 aa, synthetic construct
  REGION 1..214: note = source = /note="Description of Artificial Sequence: Synthetic polypeptide"
DIQMTQSPSSLSASVGDRVTVTCQASQDIRDYLNWYQKKPGKAPKLLIYDASNLEAGVPSRFSGSGSGTDFTFTISGLQPEDVATYYCQQFENLPITFGQGTRLEIKRTVAAPSVFIFPPSDEQLKSGTASVVCLLNNFYPREAKVQWKVDNALQSGNSQESVTEQDSKDSTYSLSSTLTLSKADYEKHKVYACEVTHQGLSSPVTKSFNRGEC

SEQ ID NO: 1254 - protein, 125 aa, synthetic construct
  REGION 1..125: note = source = /note="Description of Artificial Sequence: Synthetic polypeptide"
QVQLVQSGAEVKKPGASVKVSCKVSGYTLTELSMHWVRQAPGKGLEWMGGFDPEDGETIYAQKFQGRVTMTEDTSTDTAYMELSSLRSEDTAVYYCATGGYSSGFNYYYYYMDVWGKGTTVTVSS

SEQ ID NO: 1255 - protein, 8 aa, synthetic construct
  REGION 1..8: note = source = /note="Description of Artificial Sequence: Synthetic peptide"
GYTLTELS

SEQ ID NO: 1256 - protein, 8 aa, synthetic construct
  REGION 1..8: note = source = /note="Description of Artificial Sequence: Synthetic peptide"
FDPEDGET

SEQ ID NO: 1257 - protein, 18 aa, synthetic construct
  REGION 1..18: note = source = /note="Description of Artificial Sequence: Synthetic peptide"
ATGGYSSGFNYYYYYMDV

SEQ ID NO: 1258 - protein, 455 aa, synthetic construct
  REGION 1..455: note = source = /note="Description of Artificial Sequence: Synthetic polypeptide"
QVQLVQSGAEVKKPGASVKVSCKVSGYTLTELSMHWVRQAPGKGLEWMGGFDPEDGETIYAQKFQGRVTMTEDTSTDTAYMELSSLRSEDTAVYYCATGGYSSGFNYYYYYMDVWGKGTTVTVSSASTKGPSVFPLAPSSKSTSGGTAALGCLVKDYFPEPVTVSWNSGALTSGVHTFPAVLQSSGLYSLSSVVTVPSSSLGTQTYICNVNHKPSNTKVDKKVEPKSCDKTHTCPPCPAPELLGGPSVFLFPPKPKDTLMISRTPEVTCVVVDVSHEDPEVKFNWYVDGVEVHNAKTKPREEQYNSTYRVVSVLTVLHQDWLNGKEYKCKVSNKALPAPIEKTISKAKGQPREPQVYTLPPSREEMTKNQVSLTCLVKGFYPSDIAVEWESNGQPENNYKTTPPVLDSDGSFFLYSKLTVDKSRWQQGNVFSCSVMHEALHNHYTQKSLSLSPGK

SEQ ID NO: 1259 - protein, 113 aa, synthetic construct; identical to SEQ ID NO: 1189
  REGION 1..113: note = source = /note="Description of Artificial Sequence: Synthetic polypeptide"

SEQ ID NO: 1260 - protein, 11 aa, synthetic construct
  REGION 1..11: note = source = /note="Description of Artificial Sequence: Synthetic peptide"
QSLLYRNGNNY

SEQ ID NO: 1261 - skipped

SEQ ID NO: 1262 - protein, 9 aa, synthetic construct
  REGION 1..9: note = source = /note="Description of Artificial Sequence: Synthetic peptide"
MQALQTPPT

SEQ ID NO: 1263 - protein, 219 aa, synthetic construct; identical to SEQ ID NO: 1193
  REGION 1..219: note = source = /note="Description of Artificial Sequence: Synthetic polypeptide"

SEQ ID NO: 1264 - protein, 121 aa, synthetic construct
  REGION 1..121: note = source = /note="Description of Artificial Sequence: Synthetic polypeptide"
EVQLVQSGAEVKKPGASVKVSCKVSGYTLTELSMHWVRQAPGKGLEWMGGFDPEDGETIYAQKFQGRVTMTEDTSTDTAYMELSSLRSEDTAVYYCATGVTTYYYYGMDVWGQGTTVTVSS

SEQ ID NO: 1265 - protein, 8 aa, synthetic construct
  REGION 1..8: note = source = /note="Description of Artificial Sequence: Synthetic peptide"
GYTLTELS

SEQ ID NO: 1266 - protein, 8 aa, synthetic construct
  REGION 1..8: note = source = /note="Description of Artificial Sequence: Synthetic peptide"
FDPEDGET

SEQ ID NO: 1267 - protein, 14 aa, synthetic construct
  REGION 1..14: note = source = /note="Description of Artificial Sequence: Synthetic peptide"
ATGVTTYYYYGMDV

SEQ ID NO: 1268 - protein, 451 aa, synthetic construct
  REGION 1..451: note = source = /note="Description of Artificial Sequence: Synthetic polypeptide"
EVQLVQSGAEVKKPGASVKVSCKVSGYTLTELSMHWVRQAPGKGLEWMGGFDPEDGETIYAQKFQGRVTMTEDTSTDTAYMELSSLRSEDTAVYYCATGVTTYYYYGMDVWGQGTTVTVSSASTKGPSVFPLAPSSKSTSGGTAALGCLVKDYFPEPVTVSWNSGALTSGVHTFPAVLQSSGLYSLSSVVTVPSSSLGTQTYICNVNHKPSNTKVDKKVEPKSCDKTHTCPPCPAPELLGGPSVFLFPPKPKDTLMISRTPEVTCVVVDVSHEDPEVKFNWYVDGVEVHNAKTKPREEQYNSTYRVVSVLTVLHQDWLNGKEYKCKVSNKALPAPIEKTISKAKGQPREPQVYTLPPSREEMTKNQVSLTCLVKGFYPSDIAVEWESNGQPENNYKTTPPVLDSDGSFFLYSKLTVDKSRWQQGNVFSCSVMHEALHNHYTQKSLSLSPGK

SEQ ID NO: 1269 - protein, 113 aa, synthetic construct
  REGION 1..113: note = source = /note="Description of Artificial Sequence: Synthetic polypeptide"
DVVMTQSPLSLPVTPGEPASISCRSSQSLLYSNGNNFLDWYLQKPGQSPRLLISLGSNRASGVPDRFSGSGSGTDFTLKISRVEAEDVGIYYCMQALQTPPTFGQGTKVEIKR

SEQ ID NO: 1270 - protein, 11 aa, synthetic construct
  REGION 1..11: note = source = /note="Description of Artificial Sequence: Synthetic peptide"
QSLLYSNGNNF

SEQ ID NO: 1271 - skipped

SEQ ID NO: 1272 - protein, 9 aa, synthetic construct
  REGION 1..9: note = source = /note="Description of Artificial Sequence: Synthetic peptide"
MQALQTPPT

SEQ ID NO: 1273 - protein, 219 aa, synthetic construct
  REGION 1..219: note = source = /note="Description of Artificial Sequence: Synthetic polypeptide"
DVVMTQSPLSLPVTPGEPASISCRSSQSLLYSNGNNFLDWYLQKPGQSPRLLISLGSNRASGVPDRFSGSGSGTDFTLKISRVEAEDVGIYYCMQALQTPPTFGQGTKVEIKRTVAAPSVFIFPPSDEQLKSGTASVVCLLNNFYPREAKVQWKVDNALQSGNSQESVTEQDSKDSTYSLSSTLTLSKADYEKHKVYACEVTHQGLSSPVTKSFNRGEC

SEQ ID NO: 1274 - protein, 121 aa, synthetic construct
  REGION 1..121: note = source = /note="Description of Artificial Sequence: Synthetic polypeptide"
QITLKESGGGVVQPGGSLRLSCAASGFTFSSYGMHWVRQAPGKGLEWVAFIRYDGSNKYYADSVKGRFTISRDNSKNTLYLQMNSLRAEDTAVYYCARDLFDFWWDGMDVWGQGTTVTVSS

SEQ ID NO: 1275 - protein, 8 aa, synthetic construct
  REGION 1..8: note = source = /note="Description of Artificial Sequence: Synthetic peptide"
GFTFSSYG

SEQ ID NO: 1276 - protein, 8 aa, synthetic construct
  REGION 1..8: note = source = /note="Description of Artificial Sequence: Synthetic peptide"
IRYDGSNK

SEQ ID NO: 1277 - protein, 14 aa, synthetic construct
  REGION 1..14: note = source = /note="Description of Artificial Sequence: Synthetic peptide"
ARDLFDFWWDGMDV

SEQ ID NO: 1278 - protein, 451 aa, synthetic construct
  REGION 1..451: note = source = /note="Description of Artificial Sequence: Synthetic polypeptide"
QITLKESGGGVVQPGGSLRLSCAASGFTFSSYGMHWVRQAPGKGLEWVAFIRYDGSNKYYADSVKGRFTISRDNSKNTLYLQMNSLRAEDTAVYYCARDLFDFWWDGMDVWGQGTTVTVSSASTKGPSVFPLAPSSKSTSGGTAALGCLVKDYFPEPVTVSWNSGALTSGVHTFPAVLQSSGLYSLSSVVTVPSSSLGTQTYICNVNHKPSNTKVDKKVEPKSCDKTHTCPPCPAPELLGGPSVFLFPPKPKDTLMISRTPEVTCVVVDVSHEDPEVKFNWYVDGVEVHNAKTKPREEQYNSTYRVVSVLTVLHQDWLNGKEYKCKVSNKALPAPIEKTISKAKGQPREPQVYTLPPSREEMTKNQVSLTCLVKGFYPSDIAVEWESNGQPENNYKTTPPVLDSDGSFFLYSKLTVDKSRWQQGNVFSCSVMHEALHNHYTQKSLSLSPGK

SEQ ID NO: 1279 - protein, 110 aa, synthetic construct
  REGION 1..110: note = source = /note="Description of Artificial Sequence: Synthetic polypeptide"
EIVLTQSPGTLSLSPGEKATLSCRVSQSVSSMYLAWYQQKPGQAPRLLIYGASYRATGIPDRFSGSGSGTDFNLTISRLEPEDFAVYYCQQYVSSPMYTFGLGTKLEIKR

SEQ ID NO: 1280 - protein, 7 aa, synthetic construct
  REGION 1..7: note = source = /note="Description of Artificial Sequence: Synthetic peptide"
QSVSSMY

SEQ ID NO: 1281 - skipped

SEQ ID NO: 1282 - protein, 10 aa, synthetic construct
  REGION 1..10: note = source = /note="Description of Artificial Sequence: Synthetic peptide"
QQYVSSPMYT

SEQ ID NO: 1283 - protein, 216 aa, synthetic construct
  REGION 1..216: note = source = /note="Description of Artificial Sequence: Synthetic polypeptide"
EIVLTQSPGTLSLSPGEKATLSCRVSQSVSSMYLAWYQQKPGQAPRLLIYGASYRATGIPDRFSGSGSGTDFNLTISRLEPEDFAVYYCQQYVSSPMYTFGLGTKLEIKRTVAAPSVFIFPPSDEQLKSGTASVVCLLNNFYPREAKVQWKVDNALQSGNSQESVTEQDSKDSTYSLSSTLTLSKADYEKHKVYACEVTHQGLSSPVTKSFNRGEC

SEQ ID NO: 1284 - protein, 122 aa, synthetic construct
  REGION 1..122: note = source = /note="Description of Artificial Sequence: Synthetic polypeptide"
QVQLVQSGAEVKKPGSSVKVSCKASGGTFNNYGISWVRQAPGKGLEWMGQIIPLFGTTKYAQKFQGRVTIAADEPTSTAYMELGSLRSEDTAIYYCARDRMAADGMAVFDYWGQGTLVTVSS

SEQ ID NO: 1285 - protein, 8 aa, synthetic construct
  REGION 1..8: note = source = /note="Description of Artificial Sequence: Synthetic peptide"
GGTFNNYG

SEQ ID NO: 1286 - protein, 8 aa, synthetic construct
  REGION 1..8: note = source = /note="Description of Artificial Sequence: Synthetic peptide"
IIPLFGTT

SEQ ID NO: 1287 - protein, 15 aa, synthetic construct
  REGION 1..15: note = source = /note="Description of Artificial Sequence: Synthetic peptide"
ARDRMAADGMAVFDY

SEQ ID NO: 1288 - protein, 452 aa, synthetic construct
  REGION 1..452: note = source = /note="Description of Artificial Sequence: Synthetic polypeptide"
QVQLVQSGAEVKKPGSSVKVSCKASGGTFNNYGISWVRQAPGKGLEWMGQIIPLFGTTKYAQKFQGRVTIAADEPTSTAYMELGSLRSEDTAIYYCARDRMAADGMAVFDYWGQGTLVTVSSASTKGPSVFPLAPSSKSTSGGTAALGCLVKDYFPEPVTVSWNSGALTSGVHTFPAVLQSSGLYSLSSVVTVPSSSLGTQTYICNVNHKPSNTKVDKKVEPKSCDKTHTCPPCPAPELLGGPSVFLFPPKPKDTLMISRTPEVTCVVVDVSHEDPEVKFNWYVDGVEVHNAKTKPREEQYNSTYRVVSVLTVLHQDWLNGKEYKCKVSNKALPAPIEKTISKAKGQPREPQVYTLPPSREEMTKNQVSLTCLVKGFYPSDIAVEWESNGQPENNYKTTPPVLDSDGSFFLYSKLTVDKSRWQQGNVFSCSVMHEALHNHYTQKSLSLSPGK

SEQ ID NO: 1289 - protein, 111 aa, synthetic construct
  REGION 1..111: note = source = /note="Description of Artificial Sequence: Synthetic polypeptide"
QSVLTQPPSVSGTPGQKVIISCSGSSSNIGRHFVFWYQQLPGTAPKLLIYKNDERPSGVPDRFSGSKSGTSASLAVSGLRSEDEADYYCSSWDAALNGVVFGGGTKLTVLG

SEQ ID NO: 1290 - protein, 8 aa, synthetic construct
  REGION 1..8: note = source = /note="Description of Artificial Sequence: Synthetic peptide"
SSNIGRHF

SEQ ID NO: 1291 - skipped

SEQ ID NO: 1292 - protein, 11 aa, synthetic construct
  REGION 1..11: note = source = /note="Description of Artificial Sequence: Synthetic peptide"
SSWDAALNGVV

SEQ ID NO: 1293 - protein, 216 aa, synthetic construct
  REGION 1..216: note = source = /note="Description of Artificial Sequence: Synthetic polypeptide"
QSVLTQPPSVSGTPGQKVIISCSGSSSNIGRHFVFWYQQLPGTAPKLLIYKNDERPSGVPDRFSGSKSGTSASLAVSGLRSEDEADYYCSSWDAALNGVVFGGGTKLTVLGQPKAAPSVTLFPPSSEELQANKATLVCLISDFYPGAVTVAWKADSSPVKAGVETTTPSKQSNNKYAASSYLSLTPEQWKSHRSYSCQVTHEGSTVEKTVAPTECS

SEQ ID NO: 1294 - protein, 126 aa, synthetic construct
  REGION 1..126: note = source = /note="Description of Artificial Sequence: Synthetic polypeptide"
EVQLVQSGAEVKKPGASVKVSCKVSGYTLTELSMHWVRQAPGKGLEWMGGFDPEDGETIYAQKFQGRVTMTEDTSTDTAYMELSSLRSEDTAVYYCATEVPMVRGARRYYYYMDVWGKGTTVTVSS

SEQ ID NO: 1295 - protein, 8 aa, synthetic construct
  REGION 1..8: note = source = /note="Description of Artificial Sequence: Synthetic peptide"
GYTLTELS

SEQ ID NO: 1296 - protein, 8 aa, synthetic construct
  REGION 1..8: note = source = /note="Description of Artificial Sequence: Synthetic peptide"
FDPEDGET

SEQ ID NO: 1297 - protein, 19 aa, synthetic construct
  REGION 1..19: note = source = /note="Description of Artificial Sequence: Synthetic peptide"
ATEVPMVRGARRYYYYMDV

SEQ ID NO: 1298 - protein, 456 aa, synthetic construct
  REGION 1..456: note = source = /note="Description of Artificial Sequence: Synthetic polypeptide"
EVQLVQSGAEVKKPGASVKVSCKVSGYTLTELSMHWVRQAPGKGLEWMGGFDPEDGETIYAQKFQGRVTMTEDTSTDTAYMELSSLRSEDTAVYYCATEVPMVRGARRYYYYMDVWGKGTTVTVSSASTKGPSVFPLAPSSKSTSGGTAALGCLVKDYFPEPVTVSWNSGALTSGVHTFPAVLQSSGLYSLSSVVTVPSSSLGTQTYICNVNHKPSNTKVDKKVEPKSCDKTHTCPPCPAPELLGGPSVFLFPPKPKDTLMISRTPEVTCVVVDVSHEDPEVKFNWYVDGVEVHNAKTKPREEQYNSTYRVVSVLTVLHQDWLNGKEYKCKVSNKALPAPIEKTISKAKGQPREPQVYTLPPSREEMTKNQVSLTCLVKGFYPSDIAVEWESNGQPENNYKTTPPVLDSDGSFFLYSKLTVDKSRWQQGNVFSCSVMHEALHNHYTQKSLSLSPGK

SEQ ID NO: 1299 - protein, 113 aa, synthetic construct
  REGION 1..113: note = source = /note="Description of Artificial Sequence: Synthetic polypeptide"
DVVMTQSPLFLAVTPGEPASISCRSSQTLLYINENNYLDWYVQKPGQSPQLLIYLGSTRASGVPDRFSGGGSGTDFTLTISRVEAEDVGLYYCMQGLQTPPTFGQGTRLEIKR

SEQ ID NO: 1300 - protein, 11 aa, synthetic construct
  REGION 1..11: note = source = /note="Description of Artificial Sequence: Synthetic peptide"
QTLLYINENNY

SEQ ID NO: 1301 - skipped

SEQ ID NO: 1302 - protein, 9 aa, synthetic construct
  REGION 1..9: note = source = /note="Description of Artificial Sequence: Synthetic peptide"
MQGLQTPPT

SEQ ID NO: 1303 - protein, 219 aa, synthetic construct
  REGION 1..219: note = source = /note="Description of Artificial Sequence: Synthetic polypeptide"
DVVMTQSPLFLAVTPGEPASISCRSSQTLLYINENNYLDWYVQKPGQSPQLLIYLGSTRASGVPDRFSGGGSGTDFTLTISRVEAEDVGLYYCMQGLQTPPTFGQGTRLEIKRTVAAPSVFIFPPSDEQLKSGTASVVCLLNNFYPREAKVQWKVDNALQSGNSQESVTEQDSKDSTYSLSSTLTLSKADYEKHKVYACEVTHQGLSSPVTKSFNRGEC

SEQ ID NO: 1304 - protein, 123 aa, synthetic construct
  REGION 1..123: note = source = /note="Description of Artificial Sequence: Synthetic polypeptide"
QVQLQESGPGLVKSSETLSLTCSVSGGSISNSNYYWGWIRQPPGKGLEWIGGIYYSGSTYYNPSLESRVTISEDTSKNQISLKLSSVTAADTAVYYCARGAWELSLGDWFDPWGPGTLVTVSS

SEQ ID NO: 1305 - protein, 10 aa, synthetic construct
  REGION 1..10: note = source = /note="Description of Artificial Sequence: Synthetic peptide"
GGSISNSNYY

SEQ ID NO: 1306 - protein, 7 aa, synthetic construct
  REGION 1..7: note = source = /note="Description of Artificial Sequence: Synthetic peptide"
IYYSGST

SEQ ID NO: 1307 - protein, 15 aa, synthetic construct
  REGION 1..15: note = source = /note="Description of Artificial Sequence: Synthetic peptide"
ARGAWELSLGDWFDP

SEQ ID NO: 1308 - protein, 453 aa, synthetic construct
  REGION 1..453: note = source = /note="Description of Artificial Sequence: Synthetic polypeptide"
QVQLQESGPGLVKSSETLSLTCSVSGGSISNSNYYWGWIRQPPGKGLEWIGGIYYSGSTYYNPSLESRVTISEDTSKNQISLKLSSVTAADTAVYYCARGAWELSLGDWFDPWGPGTLVTVSSASTKGPSVFPLAPSSKSTSGGTAALGCLVKDYFPEPVTVSWNSGALTSGVHTFPAVLQSSGLYSLSSVVTVPSSSLGTQTYICNVNHKPSNTKVDKKVEPKSCDKTHTCPPCPAPELLGGPSVFLFPPKPKDTLMISRTPEVTCVVVDVSHEDPEVKFNWYVDGVEVHNAKTKPREEQYNSTYRVVSVLTVLHQDWLNGKEYKCKVSNKALPAPIEKTISKAKGQPREPQVYTLPPSREEMTKNQVSLTCLVKGFYPSDIAVEWESNGQPENNYKTTPPVLDSDGSFFLYSKLTVDKSRWQQGNVFSCSVMHEALHNHYTQKSLSLSPGK

SEQ ID NO: 1309 - protein, 113 aa, synthetic construct
  REGION 1..113: note = source = /note="Description of Artificial Sequence: Synthetic polypeptide"
QSVLTQPPSVSGAPGQRVTISCTGSSSNIGAGYDIQWYQQLPGTAPKLLIYGNNNRPSGVPDRFSGSRSGTSASLAITGLQAEDEADYYCQSYDSSLSVYVVFGGGTQLTVLG

SEQ ID NO: 1310 - protein, 9 aa, synthetic construct
  REGION 1..9: note = source = /note="Description of Artificial Sequence: Synthetic peptide"
SSNIGAGYD

SEQ ID NO: 1311 - skipped

SEQ ID NO: 1312 - protein, 12 aa, synthetic construct
  REGION 1..12: note = source = /note="Description of Artificial Sequence: Synthetic peptide"
QSYDSSLSVYVV

SEQ ID NO: 1313 - protein, 218 aa, synthetic construct
  REGION 1..218: note = source = /note="Description of Artificial Sequence: Synthetic polypeptide"
QSVLTQPPSVSGAPGQRVTISCTGSSSNIGAGYDIQWYQQLPGTAPKLLIYGNNNRPSGVPDRFSGSRSGTSASLAITGLQAEDEADYYCQSYDSSLSVYVVFGGGTQLTVLGQPKAAPSVTLFPPSSEELQANKATLVCLISDFYPGAVTVAWKADSSPVKAGVETTTPSKQSNNKYAASSYLSLTPEQWKSHRSYSCQVTHEGSTVEKTVAPTECS

SEQ ID NO: 1314 - protein, 122 aa, synthetic construct
  REGION 1..122: note = source = /note="Description of Artificial Sequence: Synthetic polypeptide"
EVQLVESGGGVVKPGGSLRLSCAASGFTFGTSSMNWVRQAPGKGLEWVAVISFDGTEIHYADSVKGRFTISRDNSKSTVFLQMNSLRPDDTALYYCAKGSGNIYFYSGMDVWGQGTTVTVSS

SEQ ID NO: 1315 - protein, 8 aa, synthetic construct
  REGION 1..8: note = source = /note="Description of Artificial Sequence: Synthetic peptide"
GFTFGTSS

SEQ ID NO: 1316 - protein, 8 aa, synthetic construct
  REGION 1..8: note = source = /note="Description of Artificial Sequence: Synthetic peptide"
ISFDGTEI

SEQ ID NO: 1317 - protein, 15 aa, synthetic construct
  REGION 1..15: note = source = /note="Description of Artificial Sequence: Synthetic peptide"
AKGSGNIYFYSGMDV

SEQ ID NO: 1318 - protein, 452 aa, synthetic construct
  REGION 1..452: note = source = /note="Description of Artificial Sequence: Synthetic polypeptide"
EVQLVESGGGVVKPGGSLRLSCAASGFTFGTSSMNWVRQAPGKGLEWVAVISFDGTEIHYADSVKGRFTISRDNSKSTVFLQMNSLRPDDTALYYCAKGSGNIYFYSGMDVWGQGTTVTVSSASTKGPSVFPLAPSSKSTSGGTAALGCLVKDYFPEPVTVSWNSGALTSGVHTFPAVLQSSGLYSLSSVVTVPSSSLGTQTYICNVNHKPSNTKVDKKVEPKSCDKTHTCPPCPAPELLGGPSVFLFPPKPKDTLMISRTPEVTCVVVDVSHEDPEVKFNWYVDGVEVHNAKTKPREEQYNSTYRVVSVLTVLHQDWLNGKEYKCKVSNKALPAPIEKTISKAKGQPREPQVYTLPPSREEMTKNQVSLTCLVKGFYPSDIAVEWESNGQPENNYKTTPPVLDSDGSFFLYSKLTVDKSRWQQGNVFSCSVMHEALHNHYTQKSLSLSPGK

SEQ ID NO: 1319 - protein, 108 aa, synthetic construct
  REGION 1..108: note = source = /note="Description of Artificial Sequence: Synthetic polypeptide"
DIQMTQSPSTLSASVGDRVTITCRAGQSISGWLAWFQQKPGKAPNLLIYETSTLESGVPSRFSGSGSGTEYTLTISSLQPDDFATYYCQQYYSYPLTFGQGTKVEIKR

SEQ ID NO: 1320 - protein, 6 aa, synthetic construct
  REGION 1..6: note = source = /note="Description of Artificial Sequence: Synthetic peptide"
QSISGW

SEQ ID NO: 1321 - skipped

SEQ ID NO: 1322 - protein, 9 aa, synthetic construct
  REGION 1..9: note = source = /note="Description of Artificial Sequence: Synthetic peptide"
QQYYSYPLT

SEQ ID NO: 1323 - protein, 214 aa, synthetic construct
  REGION 1..214: note = source = /note="Description of Artificial Sequence: Synthetic polypeptide"
DIQMTQSPSTLSASVGDRVTITCRAGQSISGWLAWFQQKPGKAPNLLIYETSTLESGVPSRFSGSGSGTEYTLTISSLQPDDFATYYCQQYYSYPLTFGQGTKVEIKRTVAAPSVFIFPPSDEQLKSGTASVVCLLNNFYPREAKVQWKVDNALQSGNSQESVTEQDSKDSTYSLSSTLTLSKADYEKHKVYACEVTHQGLSSPVTKSFNRGEC

SEQ ID NO: 1324 - protein, 126 aa, synthetic construct
  REGION 1..126: note = source = /note="Description of Artificial Sequence: Synthetic polypeptide"
EVQLVQSGAEVKKPGASVKVSCKVSGYTLTELSMHWVRQAPGKGLEWMGGFDPEDGETIYAQKFQGRVTMTEDTSTDTAYMELSSLRSEDTAVYYCATGVPAAIGVYYYYYYMDVWGKGTTVTVSS

SEQ ID NO: 1325 - protein, 8 aa, synthetic construct
  REGION 1..8: note = source = /note="Description of Artificial Sequence: Synthetic peptide"
GYTLTELS

SEQ ID NO: 1326 - protein, 8 aa, synthetic construct
  REGION 1..8: note = source = /note="Description of Artificial Sequence: Synthetic peptide"
FDPEDGET

SEQ ID NO: 1327 - protein, 19 aa, synthetic construct
  REGION 1..19: note = source = /note="Description of Artificial Sequence: Synthetic peptide"
ATGVPAAIGVYYYYYYMDV

SEQ ID NO: 1328 - protein, 456 aa, synthetic construct
  REGION 1..456: note = source = /note="Description of Artificial Sequence: Synthetic polypeptide"
EVQLVQSGAEVKKPGASVKVSCKVSGYTLTELSMHWVRQAPGKGLEWMGGFDPEDGETIYAQKFQGRVTMTEDTSTDTAYMELSSLRSEDTAVYYCATGVPAAIGVYYYYYYMDVWGKGTTVTVSSASTKGPSVFPLAPSSKSTSGGTAALGCLVKDYFPEPVTVSWNSGALTSGVHTFPAVLQSSGLYSLSSVVTVPSSSLGTQTYICNVNHKPSNTKVDKKVEPKSCDKTHTCPPCPAPELLGGPSVFLFPPKPKDTLMISRTPEVTCVVVDVSHEDPEVKFNWYVDGVEVHNAKTKPREEQYNSTYRVVSVLTVLHQDWLNGKEYKCKVSNKALPAPIEKTISKAKGQPREPQVYTLPPSREEMTKNQVSLTCLVKGFYPSDIAVEWESNGQPENNYKTTPPVLDSDGSFFLYSKLTVDKSRWQQGNVFSCSVMHEALHNHYTQKSLSLSPGK

SEQ ID NO: 1329 - protein, 113 aa, synthetic construct
  REGION 1..113: note = source = /note="Description of Artificial Sequence: Synthetic polypeptide"
DVVMTQSPLSLPVTPGEPASISCRSSQSLLYSNGYNYLDWYLQKPGQSPQLLISLGSNRASGVPDRFSGSGSGTDFTLKISRVEAEDVGVYYCMQALQSPVTFGGGTKVEIKR

SEQ ID NO: 1330 - protein, 11 aa, synthetic construct
  REGION 1..11: note = source = /note="Description of Artificial Sequence: Synthetic peptide"
QSLLYSNGYNY

SEQ ID NO: 1331 - skipped

SEQ ID NO: 1332 - protein, 9 aa, synthetic construct
  REGION 1..9: note = source = /note="Description of Artificial Sequence: Synthetic peptide"
MQALQSPVT

SEQ ID NO: 1333 - protein, 219 aa, synthetic construct
  REGION 1..219: note = source = /note="Description of Artificial Sequence: Synthetic polypeptide"
DVVMTQSPLSLPVTPGEPASISCRSSQSLLYSNGYNYLDWYLQKPGQSPQLLISLGSNRASGVPDRFSGSGSGTDFTLKISRVEAEDVGVYYCMQALQSPVTFGGGTKVEIKRTVAAPSVFIFPPSDEQLKSGTASVVCLLNNFYPREAKVQWKVDNALQSGNSQESVTEQDSKDSTYSLSSTLTLSKADYEKHKVYACEVTHQGLSSPVTKSFNRGEC

SEQ ID NO: 1334 - protein, 127 aa, synthetic construct
  REGION 1..127: note = source = /note="Description of Artificial Sequence: Synthetic polypeptide"
EVQLVQSGAEVKKPGASVKVSCKVSGYTLTELSMHWVRQAPGKGLEWMGGFDPEDGETIYAQKFQGRVTMTEDTSTDTAYMELSSLRSEDTAVYYCATDSRDGPAARGGYYYYMDVWGQGTTVTVSS

SEQ ID NO: 1335 - protein, 8 aa, synthetic construct
  REGION 1..8: note = source = /note="Description of Artificial Sequence: Synthetic peptide"
GYTLTELS

SEQ ID NO: 1336 - protein, 8 aa, synthetic construct
  REGION 1..8: note = source = /note="Description of Artificial Sequence: Synthetic peptide"
FDPEDGET

SEQ ID NO: 1337 - protein, 20 aa, synthetic construct
  REGION 1..20: note = source = /note="Description of Artificial Sequence: Synthetic peptide"
ATDSRDGPAARGGYYYYMDV

SEQ ID NO: 1338 - protein, 457 aa, synthetic construct
  REGION 1..457: note = source = /note="Description of Artificial Sequence: Synthetic polypeptide"
EVQLVQSGAEVKKPGASVKVSCKVSGYTLTELSMHWVRQAPGKGLEWMGGFDPEDGETIYAQKFQGRVTMTEDTSTDTAYMELSSLRSEDTAVYYCATDSRDGPAARGGYYYYMDVWGQGTTVTVSSASTKGPSVFPLAPSSKSTSGGTAALGCLVKDYFPEPVTVSWNSGALTSGVHTFPAVLQSSGLYSLSSVVTVPSSSLGTQTYICNVNHKPSNTKVDKKVEPKSCDKTHTCPPCPAPELLGGPSVFLFPPKPKDTLMISRTPEVTCVVVDVSHEDPEVKFNWYVDGVEVHNAKTKPREEQYNSTYRVVSVLTVLHQDWLNGKEYKCKVSNKALPAPIEKTISKAKGQPREPQVYTLPPSREEMTKNQVSLTCLVKGFYPSDIAVEWESNGQPENNYKTTPPVLDSDGSFFLYSKLTVDKSRWQQGNVFSCSVMHEALHNHYTQKSLSLSPGK

SEQ ID NO: 1339 - protein, 113 aa, synthetic construct
  REGION 1..113: note = source = /note="Description of Artificial Sequence: Synthetic polypeptide"
DVVMTQSPLSLPVTLGQPASISCRSSQSLLYINGYNYLDWYLQKPGQSPQLLIYLGSNRASGVPDRFSGSGSGTDFTLKISRVEAEDVGVYYCMQALQTPPTFGQGTKVEIKR

SEQ ID NO: 1340 - protein, 11 aa, synthetic construct
  REGION 1..11: note = source = /note="Description of Artificial Sequence: Synthetic peptide"
QSLLYINGYNY

SEQ ID NO: 1341 - skipped

SEQ ID NO: 1342 - protein, 9 aa, synthetic construct
  REGION 1..9: note = source = /note="Description of Artificial Sequence: Synthetic peptide"
MQALQTPPT

SEQ ID NO: 1343 - protein, 219 aa, synthetic construct
  REGION 1..219: note = source = /note="Description of Artificial Sequence: Synthetic polypeptide"
DVVMTQSPLSLPVTLGQPASISCRSSQSLLYINGYNYLDWYLQKPGQSPQLLIYLGSNRASGVPDRFSGSGSGTDFTLKISRVEAEDVGVYYCMQALQTPPTFGQGTKVEIKRTVAAPSVFIFPPSDEQLKSGTASVVCLLNNFYPREAKVQWKVDNALQSGNSQESVTEQDSKDSTYSLSSTLTLSKADYEKHKVYACEVTHQGLSSPVTKSFNRGEC

SEQ ID NO: 1344 - protein, 127 aa, synthetic construct
  REGION 1..127: note = source = /note="Description of Artificial Sequence: Synthetic polypeptide"
EVQLVQSGAEVKKPGSSVKVSCKASGGTFSSYAISWVRQAPGQGLEWMGGIIPIFGTANYAQKFQGRVTITADESTSTAYMELSSLRSEDTAVYYCARDAYYYDSSGYYNPDAFDIWGQGTMVTVSS

SEQ ID NO: 1345 - protein, 8 aa, synthetic construct
  REGION 1..8: note = source = /note="Description of Artificial Sequence: Synthetic peptide"
GGTFSSYA

SEQ ID NO: 1346 - protein, 8 aa, synthetic construct
  REGION 1..8: note = source = /note="Description of Artificial Sequence: Synthetic peptide"
IIPIFGTA

SEQ ID NO: 1347 - protein, 20 aa, synthetic construct
  REGION 1..20: note = source = /note="Description of Artificial Sequence: Synthetic peptide"
ARDAYYYDSSGYYNPDAFDI

SEQ ID NO: 1348 - protein, 457 aa, synthetic construct
  REGION 1..457: note = source = /note="Description of Artificial Sequence: Synthetic polypeptide"
EVQLVQSGAEVKKPGSSVKVSCKASGGTFSSYAISWVRQAPGQGLEWMGGIIPIFGTANYAQKFQGRVTITADESTSTAYMELSSLRSEDTAVYYCARDAYYYDSSGYYNPDAFDIWGQGTMVTVSSASTKGPSVFPLAPSSKSTSGGTAALGCLVKDYFPEPVTVSWNSGALTSGVHTFPAVLQSSGLYSLSSVVTVPSSSLGTQTYICNVNHKPSNTKVDKKVEPKSCDKTHTCPPCPAPELLGGPSVFLFPPKPKDTLMISRTPEVTCVVVDVSHEDPEVKFNWYVDGVEVHNAKTKPREEQYNSTYRVVSVLTVLHQDWLNGKEYKCKVSNKALPAPIEKTISKAKGQPREPQVYTLPPSREEMTKNQVSLTCLVKGFYPSDIAVEWESNGQPENNYKTTPPVLDSDGSFFLYSKLTVDKSRWQQGNVFSCSVMHEALHNHYTQKSLSLSPGK

SEQ ID NO: 1349 - protein, 113 aa, synthetic construct
  REGION 1..113: note = source = /note="Description of Artificial Sequence: Synthetic polypeptide"
DVVMTQSPLSLPVTPGEPASISCRSSQSLLHSNGYNYLDWYLQKPGQSPQLLIYLGSSRASGVPDRFSGSVSGTDFTLKISRVEAEDVGVYYCMQGLQTPRTFGRGTKLEIKR

SEQ ID NO: 1350 - protein, 11 aa, synthetic construct
  REGION 1..11: note = source = /note="Description of Artificial Sequence: Synthetic peptide"
QSLLHSNGYNY

SEQ ID NO: 1351 - skipped

SEQ ID NO: 1352 - protein, 9 aa, synthetic construct
  REGION 1..9: note = source = /note="Description of Artificial Sequence: Synthetic peptide"
MQGLQTPRT

SEQ ID NO: 1353 - protein, 219 aa, synthetic construct
  REGION 1..219: note = source = /note="Description of Artificial Sequence: Synthetic polypeptide"
DVVMTQSPLSLPVTPGEPASISCRSSQSLLHSNGYNYLDWYLQKPGQSPQLLIYLGSSRASGVPDRFSGSVSGTDFTLKISRVEAEDVGVYYCMQGLQTPRTFGRGTKLEIKRTVAAPSVFIFPPSDEQLKSGTASVVCLLNNFYPREAKVQWKVDNALQSGNSQESVTEQDSKDSTYSLSSTLTLSKADYEKHKVYACEVTHQGLSSPVTKSFNRGEC

SEQ ID NO: 1354 - protein, 129 aa, synthetic construct
  REGION 1..129: note = source = /note="Description of Artificial Sequence: Synthetic polypeptide"
QVQLVQSGAEVKKPGSSVKVSCKASGGTFSSSAISWVRQAPGQGFEWMGGIIPIYGITDYAQKFQGRVTITTDESTSTAYMELSSLTSEDTAVYYCARDDTARRVRGVPYYYYYAMDVWGQGTTVTVSS

SEQ ID NO: 1355 - protein, 8 aa, synthetic construct
  REGION 1..8: note = source = /note="Description of Artificial Sequence: Synthetic peptide"
GGTFSSSA

SEQ ID NO: 1356 - protein, 8 aa, synthetic construct
  REGION 1..8: note = source = /note="Description of Artificial Sequence: Synthetic peptide"
IIPIYGIT

SEQ ID NO: 1357 - protein, 22 aa, synthetic construct
  REGION 1..22: note = source = /note="Description of Artificial Sequence: Synthetic peptide"
ARDDTARRVRGVPYYYYYAMDV

SEQ ID NO: 1358 - protein, 459 aa, synthetic construct
  REGION 1..459: note = source = /note="Description of Artificial Sequence: Synthetic polypeptide"
QVQLVQSGAEVKKPGSSVKVSCKASGGTFSSSAISWVRQAPGQGFEWMGGIIPIYGITDYAQKFQGRVTITTDESTSTAYMELSSLTSEDTAVYYCARDDTARRVRGVPYYYYYAMDVWGQGTTVTVSSASTKGPSVFPLAPSSKSTSGGTAALGCLVKDYFPEPVTVSWNSGALTSGVHTFPAVLQSSGLYSLSSVVTVPSSSLGTQTYICNVNHKPSNTKVDKKVEPKSCDKTHTCPPCPAPELLGGPSVFLFPPKPKDTLMISRTPEVTCVVVDVSHEDPEVKFNWYVDGVEVHNAKTKPREEQYNSTYRVVSVLTVLHQDWLNGKEYKCKVSNKALPAPIEKTISKAKGQPREPQVYTLPPSREEMTKNQVSLTCLVKGFYPSDIAVEWESNGQPENNYKTTPPVLDSDGSFFLYSKLTVDKSRWQQGNVFSCSVMHEALHNHYTQKSLSLSPGK

SEQ ID NO: 1359 - protein, 108 aa, synthetic construct
  REGION 1..108: note = source = /note="Description of Artificial Sequence: Synthetic polypeptide"
ETTLTQSPAFMSATPGDEVNISCKASQDIDDDVSWYQQKPGGAPIFLIQEASTLVPGIPPRFSGSGFGTDFTLTIKNMESEDAAYYFCLQHDNLPLTFGGGTKVDIKR

SEQ ID NO: 1360 - protein, 6 aa, synthetic construct
  REGION 1..6: note = source = /note="Description of Artificial Sequence: Synthetic peptide"
QDIDDD

SEQ ID NO: 1361 - skipped

SEQ ID NO: 1362 - protein, 9 aa, synthetic construct
  REGION 1..9: note = source = /note="Description of Artificial Sequence: Synthetic peptide"
LQHDNLPLT

SEQ ID NO: 1363 - protein, 214 aa, synthetic construct
  REGION 1..214: note = source = /note="Description of Artificial Sequence: Synthetic polypeptide"
ETTLTQSPAFMSATPGDEVNISCKASQDIDDDVSWYQQKPGGAPIFLIQEASTLVPGIPPRFSGSGFGTDFTLTIKNMESEDAAYYFCLQHDNLPLTFGGGTKVDIKRTVAAPSVFIFPPSDEQLKSGTASVVCLLNNFYPREAKVQWKVDNALQSGNSQESVTEQDSKDSTYSLSSTLTLSKADYEKHKVYACEVTHQGLSSPVTKSFNRGEC

SEQ ID NO: 1364 - protein, 126 aa, synthetic construct
  REGION 1..126: note = source = /note="Description of Artificial Sequence: Synthetic polypeptide"
EVQLVQSGAEVKKPGASVKVSCKVSGYTLTELSMHWVRQAPGKGLEWMGGFDPEDGETIYAQKFQGRVTMTEDTSTDTAYMELSSLRSEDTAVYYCATEDPGPVAGPYYYYGMDVWGQGTTVTVSS

SEQ ID NO: 1365 - protein, 8 aa, synthetic construct
  REGION 1..8: note = source = /note="Description of Artificial Sequence: Synthetic peptide"
GYTLTELS

SEQ ID NO: 1366 - protein, 8 aa, synthetic construct
  REGION 1..8: note = source = /note="Description of Artificial Sequence: Synthetic peptide"
FDPEDGET

SEQ ID NO: 1367 - protein, 19 aa, synthetic construct
  REGION 1..19: note = source = /note="Description of Artificial Sequence: Synthetic peptide"
ATEDPGPVAGPYYYYGMDV

SEQ ID NO: 1368 - protein, 456 aa, synthetic construct
  REGION 1..456: note = source = /note="Description of Artificial Sequence: Synthetic polypeptide"
EVQLVQSGAEVKKPGASVKVSCKVSGYTLTELSMHWVRQAPGKGLEWMGGFDPEDGETIYAQKFQGRVTMTEDTSTDTAYMELSSLRSEDTAVYYCATEDPGPVAGPYYYYGMDVWGQGTTVTVSSASTKGPSVFPLAPSSKSTSGGTAALGCLVKDYFPEPVTVSWNSGALTSGVHTFPAVLQSSGLYSLSSVVTVPSSSLGTQTYICNVNHKPSNTKVDKKVEPKSCDKTHTCPPCPAPELLGGPSVFLFPPKPKDTLMISRTPEVTCVVVDVSHEDPEVKFNWYVDGVEVHNAKTKPREEQYNSTYRVVSVLTVLHQDWLNGKEYKCKVSNKALPAPIEKTISKAKGQPREPQVYTLPPSREEMTKNQVSLTCLVKGFYPSDIAVEWESNGQPENNYKTTPPVLDSDGSFFLYSKLTVDKSRWQQGNVFSCSVMHEALHNHYTQKSLSLSPGK

SEQ ID NO: 1369 - protein, 113 aa, synthetic construct
  REGION 1..113: note = source = /note="Description of Artificial Sequence: Synthetic polypeptide"
DVVMTQSPLVLPVTPGEPASISCRSSQSLLYINGYHYLDWYVQRPGQSPQLLIFLGSTRASGVPDRFSGSGSGTDFTLEISKVEAEDVGIYFCMQALQTPPTFGGGTKVEIKR

SEQ ID NO: 1370 - protein, 11 aa, synthetic construct
  REGION 1..11: note = source = /note="Description of Artificial Sequence: Synthetic peptide"
QSLLYINGYHY

SEQ ID NO: 1371 - skipped

SEQ ID NO: 1372 - protein, 9 aa, synthetic construct
  REGION 1..9: note = source = /note="Description of Artificial Sequence: Synthetic peptide"
MQALQTPPT

SEQ ID NO: 1373 - protein, 219 aa, synthetic construct
  REGION 1..219: note = source = /note="Description of Artificial Sequence: Synthetic polypeptide"
DVVMTQSPLVLPVTPGEPASISCRSSQSLLYINGYHYLDWYVQRPGQSPQLLIFLGSTRASGVPDRFSGSGSGTDFTLEISKVEAEDVGIYFCMQALQTPPTFGGGTKVEIKRTVAAPSVFIFPPSDEQLKSGTASVVCLLNNFYPREAKVQWKVDNALQSGNSQESVTEQDSKDSTYSLSSTLTLSKADYEKHKVYACEVTHQGLSSPVTKSFNRGEC

SEQ ID NO: 1374 - protein, 129 aa, synthetic construct; identical to SEQ ID NO: 1354
  REGION 1..129: note = source = /note="Description of Artificial Sequence: Synthetic polypeptide"

SEQ ID NO: 1375 - protein, 8 aa, synthetic construct
  REGION 1..8: note = source = /note="Description of Artificial Sequence: Synthetic peptide"
GGTFSSSA

SEQ ID NO: 1376 - protein, 8 aa, synthetic construct
  REGION 1..8: note = source = /note="Description of Artificial Sequence: Synthetic peptide"
IIPIYGIT

SEQ ID NO: 1377 - protein, 22 aa, synthetic construct
  REGION 1..22: note = source = /note="Description of Artificial Sequence: Synthetic peptide"
ARDDTARRVRGVPYYYYYAMDV

SEQ ID NO: 1378 - protein, 459 aa, synthetic construct; identical to SEQ ID NO: 1358
  REGION 1..459: note = source = /note="Description of Artificial Sequence: Synthetic polypeptide"

SEQ ID NO: 1379 - protein, 114 aa, synthetic construct
  REGION 1..114: note = source = /note="Description of Artificial Sequence: Synthetic polypeptide"
DIVMTQTPLSLPVTPGEPASISCRPSQSLLDSDDGNTYLDWYLQKPGQSPQLLIHTLSYRASGVPDRFSGSGSGTDFTLKISRVEAEDVGVYYCMQRLQFPLTFGGGTKVEIKR

SEQ ID NO: 1380 - protein, 12 aa, synthetic construct
  REGION 1..12: note = source = /note="Description of Artificial Sequence: Synthetic peptide"
QSLLDSDDGNTY

SEQ ID NO: 1381 - skipped

SEQ ID NO: 1382 - protein, 9 aa, synthetic construct
  REGION 1..9: note = source = /note="Description of Artificial Sequence: Synthetic peptide"
MQRLQFPLT

SEQ ID NO: 1383 - protein, 220 aa, synthetic construct
  REGION 1..220: note = source = /note="Description of Artificial Sequence: Synthetic polypeptide"
DIVMTQTPLSLPVTPGEPASISCRPSQSLLDSDDGNTYLDWYLQKPGQSPQLLIHTLSYRASGVPDRFSGSGSGTDFTLKISRVEAEDVGVYYCMQRLQFPLTFGGGTKVEIKRTVAAPSVFIFPPSDEQLKSGTASVVCLLNNFYPREAKVQWKVDNALQSGNSQESVTEQDSKDSTYSLSSTLTLSKADYEKHKVYACEVTHQGLSSPVTKSFNRGEC

SEQ ID NO: 1384 - protein, 126 aa, synthetic construct; identical to SEQ ID NO: 1324
  REGION 1..126: note = source = /note="Description of Artificial Sequence: Synthetic polypeptide"

SEQ ID NO: 1385 - protein, 8 aa, synthetic construct
  REGION 1..8: note = source = /note="Description of Artificial Sequence: Synthetic peptide"
GYTLTELS

SEQ ID NO: 1386 - protein, 8 aa, synthetic construct
  REGION 1..8: note = source = /note="Description of Artificial Sequence: Synthetic peptide"
FDPEDGET

SEQ ID NO: 1387 - protein, 19 aa, synthetic construct
  REGION 1..19: note = source = /note="Description of Artificial Sequence: Synthetic peptide"
ATGVPAAIGVYYYYYYMDV

SEQ ID NO: 1388 - protein, 456 aa, synthetic construct; identical to SEQ ID NO: 1328
  REGION 1..456: note = source = /note="Description of Artificial Sequence: Synthetic polypeptide"

SEQ ID NO: 1389 - protein, 113 aa, synthetic construct
  REGION 1..113: note = source = /note="Description of Artificial Sequence: Synthetic polypeptide"
DVVMTQSPLSLPVTPGEPASISCRSSQSLLYRNGYNYLDWYLQKPGQSPQLLIYWGSYRASGVPDRFSGSGSGTDFTLKISRVEAEDVGVYYCMQAVQNPPTFGQGTKVDIKR

SEQ ID NO: 1390 - protein, 11 aa, synthetic construct
  REGION 1..11: note = source = /note="Description of Artificial Sequence: Synthetic peptide"
QSLLYRNGYNY

SEQ ID NO: 1391 - skipped

SEQ ID NO: 1392 - protein, 9 aa, synthetic construct
  REGION 1..9: note = source = /note="Description of Artificial Sequence: Synthetic peptide"
MQAVQNPPT

SEQ ID NO: 1393 - protein, 219 aa, synthetic construct
  REGION 1..219: note = source = /note="Description of Artificial Sequence: Synthetic polypeptide"
DVVMTQSPLSLPVTPGEPASISCRSSQSLLYRNGYNYLDWYLQKPGQSPQLLIYWGSYRASGVPDRFSGSGSGTDFTLKISRVEAEDVGVYYCMQAVQNPPTFGQGTKVDIKRTVAAPSVFIFPPSDEQLKSGTASVVCLLNNFYPREAKVQWKVDNALQSGNSQESVTEQDSKDSTYSLSSTLTLSKADYEKHKVYACEVTHQGLSSPVTKSFNRGEC

SEQ ID NO: 1394 - protein, 129 aa, synthetic construct; identical to SEQ ID NO: 1354
  REGION 1..129: note = source = /note="Description of Artificial Sequence: Synthetic polypeptide"

SEQ ID NO: 1395 - protein, 8 aa, synthetic construct
  REGION 1..8: note = source = /note="Description of Artificial Sequence: Synthetic peptide"
GGTFSSSA

SEQ ID NO: 1396 - protein, 8 aa, synthetic construct
  REGION 1..8: note = source = /note="Description of Artificial Sequence: Synthetic peptide"
IIPIYGIT

SEQ ID NO: 1397 - protein, 22 aa, synthetic construct
  REGION 1..22: note = source = /note="Description of Artificial Sequence: Synthetic peptide"
ARDDTARRVRGVPYYYYYAMDV

SEQ ID NO: 1398 - protein, 459 aa, synthetic construct; identical to SEQ ID NO: 1358
  REGION 1..459: note = source = /note="Description of Artificial Sequence: Synthetic polypeptide"

SEQ ID NO: 1399 - protein, 109 aa, synthetic construct
  REGION 1..109: note = source = /note="Description of Artificial Sequence: Synthetic polypeptide"
DVVMTQSPAFLSVTPGERVTLSCKASQTMNNYLAWYQQKPGQAPRLLIYDASTRATDTPPRFSGSGSGTEFTLTISSVQSEDFALYYCQQYGDWLPITFGQGTRLEIKR

SEQ ID NO: 1400 - protein, 6 aa, synthetic construct
  REGION 1..6: note = source = /note="Description of Artificial Sequence: Synthetic peptide"
QTMNNY

SEQ ID NO: 1401 - skipped

SEQ ID NO: 1402 - protein, 10 aa, synthetic construct
  REGION 1..10: note = source = /note="Description of Artificial Sequence: Synthetic peptide"
QQYGDWLPIT

SEQ ID NO: 1403 - protein, 215 aa, synthetic construct
  REGION 1..215: note = source = /note="Description of Artificial Sequence: Synthetic polypeptide"
DVVMTQSPAFLSVTPGERVTLSCKASQTMNNYLAWYQQKPGQAPRLLIYDASTRATDTPPRFSGSGSGTEFTLTISSVQSEDFALYYCQQYGDWLPITFGQGTRLEIKRTVAAPSVFIFPPSDEQLKSGTASVVCLLNNFYPREAKVQWKVDNALQSGNSQESVTEQDSKDSTYSLSSTLTLSKADYEKHKVYACEVTHQGLSSPVTKSFNRGEC

SEQ ID NO: 1404 - protein, 124 aa, synthetic construct
  REGION 1..124: note = source = /note="Description of Artificial Sequence: Synthetic polypeptide"
EVQLVQSGAEVKKPGASVKVSCKVSGYTLTELSMHWVRQAPGKGLEWMGGFDPEDGETIYAQKFQGRVTMTEDTSTDTAYMELSSLRSEDTAVYYCATAFPEATISYYYYMDVWGKGTTVTVSS

SEQ ID NO: 1405 - protein, 8 aa, synthetic construct
  REGION 1..8: note = source = /note="Description of Artificial Sequence: Synthetic peptide"
GYTLTELS

SEQ ID NO: 1406 - protein, 8 aa, synthetic construct
  REGION 1..8: note = source = /note="Description of Artificial Sequence: Synthetic peptide"
FDPEDGET

SEQ ID NO: 1407 - protein, 17 aa, synthetic construct
  REGION 1..17: note = source = /note="Description of Artificial Sequence: Synthetic peptide"
ATAFPEATISYYYYMDV

SEQ ID NO: 1408 - protein, 454 aa, synthetic construct
  REGION 1..454: note = source = /note="Description of Artificial Sequence: Synthetic polypeptide"
EVQLVQSGAEVKKPGASVKVSCKVSGYTLTELSMHWVRQAPGKGLEWMGGFDPEDGETIYAQKFQGRVTMTEDTSTDTAYMELSSLRSEDTAVYYCATAFPEATISYYYYMDVWGKGTTVTVSSASTKGPSVFPLAPSSKSTSGGTAALGCLVKDYFPEPVTVSWNSGALTSGVHTFPAVLQSSGLYSLSSVVTVPSSSLGTQTYICNVNHKPSNTKVDKKVEPKSCDKTHTCPPCPAPELLGGPSVFLFPPKPKDTLMISRTPEVTCVVVDVSHEDPEVKFNWYVDGVEVHNAKTKPREEQYNSTYRVVSVLTVLHQDWLNGKEYKCKVSNKALPAPIEKTISKAKGQPREPQVYTLPPSREEMTKNQVSLTCLVKGFYPSDIAVEWESNGQPENNYKTTPPVLDSDGSFFLYSKLTVDKSRWQQGNVFSCSVMHEALHNHYTQKSLSLSPGK

SEQ ID NO: 1409 - protein, 113 aa, synthetic construct
  REGION 1..113: note = source = /note="Description of Artificial Sequence: Synthetic polypeptide"
DVVMTQSPLSLPVTPGEPASISCRSSQSLLYRNGYNYLDWYLQKPGQSPQLLIYWGSYRASGVPDRFSGSGSGTDFTLKISRVEAEDVGVYYCMQAVQNPPTFGQGTKVEIKR

SEQ ID NO: 1410 - protein, 11 aa, synthetic construct
  REGION 1..11: note = source = /note="Description of Artificial Sequence: Synthetic peptide"
QSLLYRNGYNY

SEQ ID NO: 1411 - skipped

SEQ ID NO: 1412 - protein, 9 aa, synthetic construct
  REGION 1..9: note = source = /note="Description of Artificial Sequence: Synthetic peptide"
MQAVQNPPT

SEQ ID NO: 1413 - protein, 219 aa, synthetic construct
  REGION 1..219: note = source = /note="Description of Artificial Sequence: Synthetic polypeptide"
DVVMTQSPLSLPVTPGEPASISCRSSQSLLYRNGYNYLDWYLQKPGQSPQLLIYWGSYRASGVPDRFSGSGSGTDFTLKISRVEAEDVGVYYCMQAVQNPPTFGQGTKVEIKRTVAAPSVFIFPPSDEQLKSGTASVVCLLNNFYPREAKVQWKVDNALQSGNSQESVTEQDSKDSTYSLSSTLTLSKADYEKHKVYACEVTHQGLSSPVTKSFNRGEC

SEQ ID NO: 1414 - protein, 129 aa, synthetic construct
  REGION 1..129: note = source = /note="Description of Artificial Sequence: Synthetic polypeptide"
QMQLVQSGAEVKKPGSSVKVSCKASGGTFSSSAISWVRQAPGQGFEWMGGIIPIYGITDYAQKFQGRVTITTDESTSTAYMELSSLTSEDTAVYYCARDDTARRVRGVPYYYYYAMDVWGQGTTVTVSS

SEQ ID NO: 1415 - protein, 8 aa, synthetic construct
  REGION 1..8: note = source = /note="Description of Artificial Sequence: Synthetic peptide"
GGTFSSSA

SEQ ID NO: 1416 - protein, 8 aa, synthetic construct
  REGION 1..8: note = source = /note="Description of Artificial Sequence: Synthetic peptide"
IIPIYGIT

SEQ ID NO: 1417 - protein, 22 aa, synthetic construct
  REGION 1..22: note = source = /note="Description of Artificial Sequence: Synthetic peptide"
ARDDTARRVRGVPYYYYYAMDV

SEQ ID NO: 1418 - protein, 459 aa, synthetic construct
  REGION 1..459: note = source = /note="Description of Artificial Sequence: Synthetic polypeptide"
QMQLVQSGAEVKKPGSSVKVSCKASGGTFSSSAISWVRQAPGQGFEWMGGIIPIYGITDYAQKFQGRVTITTDESTSTAYMELSSLTSEDTAVYYCARDDTARRVRGVPYYYYYAMDVWGQGTTVTVSSASTKGPSVFPLAPSSKSTSGGTAALGCLVKDYFPEPVTVSWNSGALTSGVHTFPAVLQSSGLYSLSSVVTVPSSSLGTQTYICNVNHKPSNTKVDKKVEPKSCDKTHTCPPCPAPELLGGPSVFLFPPKPKDTLMISRTPEVTCVVVDVSHEDPEVKFNWYVDGVEVHNAKTKPREEQYNSTYRVVSVLTVLHQDWLNGKEYKCKVSNKALPAPIEKTISKAKGQPREPQVYTLPPSREEMTKNQVSLTCLVKGFYPSDIAVEWESNGQPENNYKTTPPVLDSDGSFFLYSKLTVDKSRWQQGNVFSCSVMHEALHNHYTQKSLSLSPGK

SEQ ID NO: 1419 - protein, 114 aa, synthetic construct
  REGION 1..114: note = source = /note="Description of Artificial Sequence: Synthetic polypeptide"
DIVMTQTPLSLPVTPGEPASMSCRSSRSLLDSDDGNTHLDWYLQKPGQSPQLLIQSLSYRASGVPDRFSGSGSGTDFTLEISRVEAEDVGIYYCMQRKEFPLTFGGGTKVEIKR

SEQ ID NO: 1420 - protein, 12 aa, synthetic construct
  REGION 1..12: note = source = /note="Description of Artificial Sequence: Synthetic peptide"
RSLLDSDDGNTH

SEQ ID NO: 1421 - skipped

SEQ ID NO: 1422 - protein, 9 aa, synthetic construct
  REGION 1..9: note = source = /note="Description of Artificial Sequence: Synthetic peptide"
MQRKEFPLT

SEQ ID NO: 1423 - protein, 220 aa, synthetic construct
  REGION 1..220: note = source = /note="Description of Artificial Sequence: Synthetic polypeptide"
DIVMTQTPLSLPVTPGEPASMSCRSSRSLLDSDDGNTHLDWYLQKPGQSPQLLIQSLSYRASGVPDRFSGSGSGTDFTLEISRVEAEDVGIYYCMQRKEFPLTFGGGTKVEIKRTVAAPSVFIFPPSDEQLKSGTASVVCLLNNFYPREAKVQWKVDNALQSGNSQESVTEQDSKDSTYSLSSTLTLSKADYEKHKVYACEVTHQGLSSPVTKSFNRGEC

SEQ ID NO: 1424 - protein, 128 aa, synthetic construct
  REGION 1..128: note = source = /note="Description of Artificial Sequence: Synthetic polypeptide"
EVQLVQSGAEVKKPGSSVKVSCKASGGTFSSYAISWVRQAPGQGLEWMGGIIPIFGTANYAQKFQGRVTITADKSTSTAYMELSSLRSEDTAVYYCARGPWYYDSSGYSSYAYYMDVWGQGTTVTVSS

SEQ ID NO: 1425 - protein, 8 aa, synthetic construct
  REGION 1..8: note = source = /note="Description of Artificial Sequence: Synthetic peptide"
GGTFSSYA

SEQ ID NO: 1426 - protein, 8 aa, synthetic construct
  REGION 1..8: note = source = /note="Description of Artificial Sequence: Synthetic peptide"
IIPIFGTA

SEQ ID NO: 1427 - protein, 21 aa, synthetic construct
  REGION 1..21: note = source = /note="Description of Artificial Sequence: Synthetic peptide"
ARGPWYYDSSGYSSYAYYMDV

SEQ ID NO: 1428 - protein, 458 aa, synthetic construct; identical to SEQ ID NO: 1178
  REGION 1..458: note = source = /note="Description of Artificial Sequence: Synthetic polypeptide"

SEQ ID NO: 1429 - protein, 114 aa, synthetic construct
  REGION 1..114: note = source = /note="Description of Artificial Sequence: Synthetic polypeptide"
DVVMTQSPLSLPVTPGEPASISCRSSQSLLHSDGYNYLDWYLQKPGQSPQLLIYLGSNRASGVPDRFSGSGSGTDFTLKISRVEAEDVGVYYCMQALHTPGVTFGGGTKVEIKR

SEQ ID NO: 1430 - protein, 11 aa, synthetic construct
  REGION 1..11: note = source = /note="Description of Artificial Sequence: Synthetic peptide"
QSLLHSDGYNY

SEQ ID NO: 1431 - skipped

SEQ ID NO: 1432 - protein, 10 aa, synthetic construct
  REGION 1..10: note = source = /note="Description of Artificial Sequence: Synthetic peptide"
MQALHTPGVT

SEQ ID NO: 1433 - protein, 220 aa, synthetic construct
  REGION 1..220: note = source = /note="Description of Artificial Sequence: Synthetic polypeptide"
DVVMTQSPLSLPVTPGEPASISCRSSQSLLHSDGYNYLDWYLQKPGQSPQLLIYLGSNRASGVPDRFSGSGSGTDFTLKISRVEAEDVGVYYCMQALHTPGVTFGGGTKVEIKRTVAAPSVFIFPPSDEQLKSGTASVVCLLNNFYPREAKVQWKVDNALQSGNSQESVTEQDSKDSTYSLSSTLTLSKADYEKHKVYACEVTHQGLSSPVTKSFNRGEC

SEQ ID NO: 1434 - protein, 123 aa, synthetic construct
  REGION 1..123: note = source = /note="Description of Artificial Sequence: Synthetic polypeptide"
QLQLQESGPGLVKPSETLSLTCTVTGGSISSSSYYWAWIRQPPGKGLEWIGGIYYSGSTYYNVSLESRVTISQDTSKNQFSLKLTSVTAADTAVYYCARGAWELRLGDWFDPWGQGTLVTVSS

SEQ ID NO: 1435 - protein, 10 aa, synthetic construct
  REGION 1..10: note = source = /note="Description of Artificial Sequence: Synthetic peptide"
GGSISSSSYY

SEQ ID NO: 1436 - protein, 7 aa, synthetic construct
  REGION 1..7: note = source = /note="Description of Artificial Sequence: Synthetic peptide"
IYYSGST

SEQ ID NO: 1437 - protein, 15 aa, synthetic construct
  REGION 1..15: note = source = /note="Description of Artificial Sequence: Synthetic peptide"
ARGAWELRLGDWFDP

SEQ ID NO: 1438 - protein, 453 aa, synthetic construct
  REGION 1..453: note = source = /note="Description of Artificial Sequence: Synthetic polypeptide"
QLQLQESGPGLVKPSETLSLTCTVTGGSISSSSYYWAWIRQPPGKGLEWIGGIYYSGSTYYNVSLESRVTISQDTSKNQFSLKLTSVTAADTAVYYCARGAWELRLGDWFDPWGQGTLVTVSSASTKGPSVFPLAPSSKSTSGGTAALGCLVKDYFPEPVTVSWNSGALTSGVHTFPAVLQSSGLYSLSSVVTVPSSSLGTQTYICNVNHKPSNTKVDKKVEPKSCDKTHTCPPCPAPELLGGPSVFLFPPKPKDTLMISRTPEVTCVVVDVSHEDPEVKFNWYVDGVEVHNAKTKPREEQYNSTYRVVSVLTVLHQDWLNGKEYKCKVSNKALPAPIEKTISKAKGQPREPQVYTLPPSREEMTKNQVSLTCLVKGFYPSDIAVEWESNGQPENNYKTTPPVLDSDGSFFLYSKLTVDKSRWQQGNVFSCSVMHEALHNHYTQKSLSLSPGK

SEQ ID NO: 1439 - protein, 118 aa, synthetic construct
  REGION 1..118: note = source = /note="Description of Artificial Sequence: Synthetic polypeptide"
QSVLTQPPSVSGAPGQRVTISCTGSSSNIGAGYDIQWYQQLPGTAPKLLIYGYSNRPSGVPDRFSGSKSGTSASLAITGLQAEDEADYYCQSYDSSLSVYVVFGGGTQLTVLGQPKAA

SEQ ID NO: 1440 - protein, 9 aa, synthetic construct
  REGION 1..9: note = source = /note="Description of Artificial Sequence: Synthetic peptide"
SSNIGAGYD

SEQ ID NO: 1441 - skipped

SEQ ID NO: 1442 - protein, 12 aa, synthetic construct
  REGION 1..12: note = source = /note="Description of Artificial Sequence: Synthetic peptide"
QSYDSSLSVYVV

SEQ ID NO: 1443 - protein, 218 aa, synthetic construct
  REGION 1..218: note = source = /note="Description of Artificial Sequence: Synthetic polypeptide"
QSVLTQPPSVSGAPGQRVTISCTGSSSNIGAGYDIQWYQQLPGTAPKLLIYGYSNRPSGVPDRFSGSKSGTSASLAITGLQAEDEADYYCQSYDSSLSVYVVFGGGTQLTVLGQPKAAPSVTLFPPSSEELQANKATLVCLISDFYPGAVTVAWKADSSPVKAGVETTTPSKQSNNKYAASSYLSLTPEQWKSHRSYSCQVTHEGSTVEKTVAPTECS

SEQ ID NO: 1444 - protein, 122 aa, synthetic construct
  REGION 1..122: note = source = /note="Description of Artificial Sequence: Synthetic polypeptide"
QVQLQESGGGVVQPGGSLRLSCAASRFTFEDYAMHWVRQPPGKGLEWVSGISWKSGGINYADSVKGRFTISRDNAQNSLYLQMNSLRAEDTALYYCVKDPTLVATDRAFNIWGQGTMVTVSS

SEQ ID NO: 1445 - protein, 8 aa, synthetic construct
  REGION 1..8: note = source = /note="Description of Artificial Sequence: Synthetic peptide"
RFTFEDYA

SEQ ID NO: 1446 - protein, 8 aa, synthetic construct
  REGION 1..8: note = source = /note="Description of Artificial Sequence: Synthetic peptide"
ISWKSGGI

SEQ ID NO: 1447 - protein, 15 aa, synthetic construct
  REGION 1..15: note = source = /note="Description of Artificial Sequence: Synthetic peptide"
VKDPTLVATDRAFNI

SEQ ID NO: 1448 - protein, 452 aa, synthetic construct
  REGION 1..452: note = source = /note="Description of Artificial Sequence: Synthetic polypeptide"
QVQLQESGGGVVQPGGSLRLSCAASRFTFEDYAMHWVRQPPGKGLEWVSGISWKSGGINYADSVKGRFTISRDNAQNSLYLQMNSLRAEDTALYYCVKDPTLVATDRAFNIWGQGTMVTVSSASTKGPSVFPLAPSSKSTSGGTAALGCLVKDYFPEPVTVSWNSGALTSGVHTFPAVLQSSGLYSLSSVVTVPSSSLGTQTYICNVNHKPSNTKVDKKVEPKSCDKTHTCPPCPAPELLGGPSVFLFPPKPKDTLMISRTPEVTCVVVDVSHEDPEVKFNWYVDGVEVHNAKTKPREEQYNSTYRVVSVLTVLHQDWLNGKEYKCKVSNKALPAPIEKTISKAKGQPREPQVYTLPPSREEMTKNQVSLTCLVKGFYPSDIAVEWESNGQPENNYKTTPPVLDSDGSFFLYSKLTVDKSRWQQGNVFSCSVMHEALHNHYTQKSLSLSPGK

SEQ ID NO: 1449 - protein, 117 aa, synthetic construct
  REGION 1..117: note = source = /note="Description of Artificial Sequence: Synthetic polypeptide"
DVVMTQSPLSLPVTPGEPASISCRSSQSLLHSNGYNYLDWYLQKPGQSPQLLIYLGSNRASGVPDRFSGSGSGTDFTLKISRVEAEDVGVYYCMQYLQTPDTFGQGTKLEIKRAAPS

SEQ ID NO: 1450 - protein, 11 aa, synthetic construct
  REGION 1..11: note = source = /note="Description of Artificial Sequence: Synthetic peptide"
QSLLHSNGYNY

SEQ ID NO: 1451 - skipped

SEQ ID NO: 1452 - protein, 9 aa, synthetic construct
  REGION 1..9: note = source = /note="Description of Artificial Sequence: Synthetic peptide"
MQYLQTPDT

SEQ ID NO: 1453 - protein, 219 aa, synthetic construct
  REGION 1..219: note = source = /note="Description of Artificial Sequence: Synthetic polypeptide"
DVVMTQSPLSLPVTPGEPASISCRSSQSLLHSNGYNYLDWYLQKPGQSPQLLIYLGSNRASGVPDRFSGSGSGTDFTLKISRVEAEDVGVYYCMQYLQTPDTFGQGTKLEIKRTVAAPSVFIFPPSDEQLKSGTASVVCLLNNFYPREAKVQWKVDNALQSGNSQESVTEQDSKDSTYSLSSTLTLSKADYEKHKVYACEVTHQGLSSPVTKSFNRGEC

SEQ ID NO: 1454 - protein, 129 aa, synthetic construct; identical to SEQ ID NO: 1354
  REGION 1..129: note = source = /note="Description of Artificial Sequence: Synthetic polypeptide"

SEQ ID NO: 1455 - protein, 8 aa, synthetic construct
  REGION 1..8: note = source = /note="Description of Artificial Sequence: Synthetic peptide"
GGTFSSSA

SEQ ID NO: 1456 - protein, 8 aa, synthetic construct
  REGION 1..8: note = source = /note="Description of Artificial Sequence: Synthetic peptide"
IIPIYGIT

SEQ ID NO: 1457 - protein, 22 aa, synthetic construct
  REGION 1..22: note = source = /note="Description of Artificial Sequence: Synthetic peptide"
ARDDTARRVRGVPYYYYYAMDV

SEQ ID NO: 1458 - protein, 459 aa, synthetic construct; identical to SEQ ID NO: 1358
  REGION 1..459: note = source = /note="Description of Artificial Sequence: Synthetic polypeptide"

SEQ ID NO: 1459 - protein, 114 aa, synthetic construct
  REGION 1..114: note = source = /note="Description of Artificial Sequence: Synthetic polypeptide"
EIVLTQSPDFQSVTPKEKVTITCRASQNIDSSLHWYQQKPGQSPKLLINYASQSFSGVPSRFSGSGSGTDFTLTIDSLEPEDAATYFCHQSSSLPLTFGGGTKVEIRRTVAAPS

SEQ ID NO: 1460 - protein, 6 aa, synthetic construct
  REGION 1..6: note = source = /note="Description of Artificial Sequence: Synthetic peptide"
QNIDSS

SEQ ID NO: 1461 - skipped

SEQ ID NO: 1462 - protein, 9 aa, synthetic construct
  REGION 1..9: note = source = /note="Description of Artificial Sequence: Synthetic peptide"
HQSSSLPLT

SEQ ID NO: 1463 - protein, 218 aa, synthetic construct; identical to SEQ ID NO: 1443
  REGION 1..218: note = source = /note="Description of Artificial Sequence: Synthetic polypeptide"

SEQ ID NO: 1464 - protein, 129 aa, synthetic construct
  REGION 1..129: note = source = /note="Description of Artificial Sequence: Synthetic polypeptide"
EVQLVQSGAEVKKPGSSVKVSCKTSGGTFSSSAISWVRQAPGQGFEWMGGIIPIYGITDYAQKFQGRVTITTDESTSTAYMELSSLTSEDTAVYYCARDDTARRVRGVPYYYYYAMDVWGQGTTVTVSS

SEQ ID NO: 1465 - protein, 8 aa, synthetic construct
  REGION 1..8: note = source = /note="Description of Artificial Sequence: Synthetic peptide"
GGTFSSSA

SEQ ID NO: 1466 - protein, 8 aa, synthetic construct
  REGION 1..8: note = source = /note="Description of Artificial Sequence: Synthetic peptide"
IIPIYGIT

SEQ ID NO: 1467 - protein, 22 aa, synthetic construct
  REGION 1..22: note = source = /note="Description of Artificial Sequence: Synthetic peptide"
ARDDTARRVRGVPYYYYYAMDV

SEQ ID NO: 1468 - protein, 459 aa, synthetic construct
  REGION 1..459: note = source = /note="Description of Artificial Sequence: Synthetic polypeptide"
EVQLVQSGAEVKKPGSSVKVSCKTSGGTFSSSAISWVRQAPGQGFEWMGGIIPIYGITDYAQKFQGRVTITTDESTSTAYMELSSLTSEDTAVYYCARDDTARRVRGVPYYYYYAMDVWGQGTTVTVSSASTKGPSVFPLAPSSKSTSGGTAALGCLVKDYFPEPVTVSWNSGALTSGVHTFPAVLQSSGLYSLSSVVTVPSSSLGTQTYICNVNHKPSNTKVDKKVEPKSCDKTHTCPPCPAPELLGGPSVFLFPPKPKDTLMISRTPEVTCVVVDVSHEDPEVKFNWYVDGVEVHNAKTKPREEQYNSTYRVVSVLTVLHQDWLNGKEYKCKVSNKALPAPIEKTISKAKGQPREPQVYTLPPSREEMTKNQVSLTCLVKGFYPSDIAVEWESNGQPENNYKTTPPVLDSDGSFFLYSKLTVDKSRWQQGNVFSCSVMHEALHNHYTQKSLSLSPGK

SEQ ID NO: 1469 - protein, 114 aa, synthetic construct
  REGION 1..114: note = source = /note="Description of Artificial Sequence: Synthetic polypeptide"
EIVLTQSPGTLSLSPGERATLSCRASQSVSSYLAWYQQKPGQAPRLLIYDASNRATGIPARFSGSGSGTDFTLTISSLQSEDFAVYYCQQYDDWPQTFGQGTRLEIKRTVAAPS

SEQ ID NO: 1470 - protein, 6 aa, synthetic construct
  REGION 1..6: note = source = /note="Description of Artificial Sequence: Synthetic peptide"
QSVSSY

SEQ ID NO: 1471 - skipped

SEQ ID NO: 1472 - protein, 9 aa, synthetic construct
  REGION 1..9: note = source = /note="Description of Artificial Sequence: Synthetic peptide"
QQYDDWPQT

SEQ ID NO: 1473 - protein, 214 aa, synthetic construct
  REGION 1..214: note = source = /note="Description of Artificial Sequence: Synthetic polypeptide"
EIVLTQSPGTLSLSPGERATLSCRASQSVSSYLAWYQQKPGQAPRLLIYDASNRATGIPARFSGSGSGTDFTLTISSLQSEDFAVYYCQQYDDWPQTFGQGTRLEIKRTVAAPSVFIFPPSDEQLKSGTASVVCLLNNFYPREAKVQWKVDNALQSGNSQESVTEQDSKDSTYSLSSTLTLSKADYEKHKVYACEVTHQGLSSPVTKSFNRGEC

SEQ ID NO: 1474 - protein, 129 aa, synthetic construct; identical to SEQ ID NO: 1414
  REGION 1..129: note = source = /note="Description of Artificial Sequence: Synthetic polypeptide"

SEQ ID NO: 1475 - protein, 8 aa, synthetic construct
  REGION 1..8: note = source = /note="Description of Artificial Sequence: Synthetic peptide"
GGTFSSSA

SEQ ID NO: 1476 - protein, 8 aa, synthetic construct
  REGION 1..8: note = source = /note="Description of Artificial Sequence: Synthetic peptide"
IIPIYGIT

SEQ ID NO: 1477 - protein, 22 aa, synthetic construct
  REGION 1..22: note = source = /note="Description of Artificial Sequence: Synthetic peptide"
ARDDTARRVRGVPYYYYYAMDV

SEQ ID NO: 1478 - protein, 459 aa, synthetic construct; identical to SEQ ID NO: 1418
  REGION 1..459: note = source = /note="Description of Artificial Sequence: Synthetic polypeptide"

SEQ ID NO: 1479 - protein, 114 aa, synthetic construct
  REGION 1..114: note = source = /note="Description of Artificial Sequence: Synthetic polypeptide"
EIVMTQSPATLSLSTGERATLFCRTSQNVYGEVAWYQQKPGQAPRLLIYDTFERAAGIPAKFSGSGSGTDFTLTISRVEPEDFAVYYCQQRRDWPITFGQGTRLEIKRTVAAPS

SEQ ID NO: 1480 - protein, 6 aa, synthetic construct
  REGION 1..6: note = source = /note="Description of Artificial Sequence: Synthetic peptide"
QNVYGE

SEQ ID NO: 1481 - skipped

SEQ ID NO: 1482 - protein, 9 aa, synthetic construct
  REGION 1..9: note = source = /note="Description of Artificial Sequence: Synthetic peptide"
QQRRDWPIT

SEQ ID NO: 1483 - protein, 214 aa, synthetic construct
  REGION 1..214: note = source = /note="Description of Artificial Sequence: Synthetic polypeptide"
EIVMTQSPATLSLSTGERATLFCRTSQNVYGEVAWYQQKPGQAPRLLIYDTFERAAGIPAKFSGSGSGTDFTLTISRVEPEDFAVYYCQQRRDWPITFGQGTRLEIKRTVAAPSVFIFPPSDEQLKSGTASVVCLLNNFYPREAKVQWKVDNALQSGNSQESVTEQDSKDSTYSLSSTLTLSKADYEKHKVYACEVTHQGLSSPVTKSFNRGEC

SEQ ID NO: 1484 - protein, 129 aa, synthetic construct; identical to SEQ ID NO: 1354
  REGION 1..129: note = source = /note="Description of Artificial Sequence: Synthetic polypeptide"

SEQ ID NO: 1485 - protein, 8 aa, synthetic construct
  REGION 1..8: note = source = /note="Description of Artificial Sequence: Synthetic peptide"
GGTFSSSA

SEQ ID NO: 1486 - protein, 8 aa, synthetic construct
  REGION 1..8: note = source = /note="Description of Artificial Sequence: Synthetic peptide"
IIPIYGIT

SEQ ID NO: 1487 - protein, 22 aa, synthetic construct
  REGION 1..22: note = source = /note="Description of Artificial Sequence: Synthetic peptide"
ARDDTARRVRGVPYYYYYAMDV

SEQ ID NO: 1488 - protein, 459 aa, synthetic construct; identical to SEQ ID NO: 1358
  REGION 1..459: note = source = /note="Description of Artificial Sequence: Synthetic polypeptide"

SEQ ID NO: 1489 - protein, 114 aa, synthetic construct
  REGION 1..114: note = source = /note="Description of Artificial Sequence: Synthetic polypeptide"
DIQMTQSPSSLSASVGDRVTITCQASRDISDSLSWYQQKPGKAPKLLIFDASNLKTGVSSRFSGSGSGTDFTFTISSLQPEDIATYYCHQYDNLPLTFGGGTKVEIKRTVAAPS

SEQ ID NO: 1490 - protein, 6 aa, synthetic construct
  REGION 1..6: note = source = /note="Description of Artificial Sequence: Synthetic peptide"
RDISDS

SEQ ID NO: 1491 - skipped

SEQ ID NO: 1492 - protein, 9 aa, synthetic construct
  REGION 1..9: note = source = /note="Description of Artificial Sequence: Synthetic peptide"
HQYDNLPLT

SEQ ID NO: 1493 - protein, 214 aa, synthetic construct
  REGION 1..214: note = source = /note="Description of Artificial Sequence: Synthetic polypeptide"
DIQMTQSPSSLSASVGDRVTITCQASRDISDSLSWYQQKPGKAPKLLIFDASNLKTGVSSRFSGSGSGTDFTFTISSLQPEDIATYYCHQYDNLPLTFGGGTKVEIKRTVAAPSVFIFPPSDEQLKSGTASVVCLLNNFYPREAKVQWKVDNALQSGNSQESVTEQDSKDSTYSLSSTLTLSKADYEKHKVYACEVTHQGLSSPVTKSFNRGEC

SEQ ID NO: 1494 - protein, 129 aa, synthetic construct; identical to SEQ ID NO: 1414
  REGION 1..129: note = source = /note="Description of Artificial Sequence: Synthetic polypeptide"

SEQ ID NO: 1495 - protein, 8 aa, synthetic construct
  REGION 1..8: note = source = /note="Description of Artificial Sequence: Synthetic peptide"
GGTFSSSA

SEQ ID NO: 1496 - protein, 8 aa, synthetic construct
  REGION 1..8: note = source = /note="Description of Artificial Sequence: Synthetic peptide"
IIPIYGIT

SEQ ID NO: 1497 - protein, 22 aa, synthetic construct
  REGION 1..22: note = source = /note="Description of Artificial Sequence: Synthetic peptide"
ARDDTARRVRGVPYYYYYAMDV

SEQ ID NO: 1498 - protein, 459 aa, synthetic construct; identical to SEQ ID NO: 1418
  REGION 1..459: note = source = /note="Description of Artificial Sequence: Synthetic polypeptide"

SEQ ID NO: 1499 - protein, 114 aa, synthetic construct
  REGION 1..114: note = source = /note="Description of Artificial Sequence: Synthetic polypeptide"
EIVMTQSPATLSLSPGERATLSCRASESVTTFLAWYQQKPGQAPRLLITDASNRATGIPGRFSGSGSGTDFTLTISSLEPEDFAVYYCHQHTNWPLTFGGGTKLEIKRTVAAPS

SEQ ID NO: 1500 - protein, 6 aa, synthetic construct
  REGION 1..6: note = source = /note="Description of Artificial Sequence: Synthetic peptide"
ESVTTF

SEQ ID NO: 1501 - skipped

SEQ ID NO: 1502 - protein, 9 aa, synthetic construct
  REGION 1..9: note = source = /note="Description of Artificial Sequence: Synthetic peptide"
HQHTNWPLT

SEQ ID NO: 1503 - protein, 214 aa, synthetic construct
  REGION 1..214: note = source = /note="Description of Artificial Sequence: Synthetic polypeptide"
EIVMTQSPATLSLSPGERATLSCRASESVTTFLAWYQQKPGQAPRLLITDASNRATGIPGRFSGSGSGTDFTLTISSLEPEDFAVYYCHQHTNWPLTFGGGTKLEIKRTVAAPSVFIFPPSDEQLKSGTASVVCLLNNFYPREAKVQWKVDNALQSGNSQESVTEQDSKDSTYSLSSTLTLSKADYEKHKVYACEVTHQGLSSPVTKSFNRGEC

SEQ ID NO: 1504 - protein, 129 aa, synthetic construct
  REGION 1..129: note = source = /note="Description of Artificial Sequence: Synthetic polypeptide"
EVQLVQSGAEVKKPGASVKVSCKVSGYTLTELSMHWVRQAPGKGLEWMGGFDPEDGETIYAQKFQGRVTMTEDTSTDTAYMELSSLRSEDTAVYYCATEVGYCSGGSCYISYYYGMDVWGQGTTVTVSS

SEQ ID NO: 1505 - protein, 8 aa, synthetic construct
  REGION 1..8: note = source = /note="Description of Artificial Sequence: Synthetic peptide"
GYTLTELS

SEQ ID NO: 1506 - protein, 8 aa, synthetic construct
  REGION 1..8: note = source = /note="Description of Artificial Sequence: Synthetic peptide"
FDPEDGET

SEQ ID NO: 1507 - protein, 22 aa, synthetic construct
  REGION 1..22: note = source = /note="Description of Artificial Sequence: Synthetic peptide"
ATEVGYCSGGSCYISYYYGMDV

SEQ ID NO: 1508 - protein, 459 aa, synthetic construct
  REGION 1..459: note = source = /note="Description of Artificial Sequence: Synthetic polypeptide"
EVQLVQSGAEVKKPGASVKVSCKVSGYTLTELSMHWVRQAPGKGLEWMGGFDPEDGETIYAQKFQGRVTMTEDTSTDTAYMELSSLRSEDTAVYYCATEVGYCSGGSCYISYYYGMDVWGQGTTVTVSSASTKGPSVFPLAPSSKSTSGGTAALGCLVKDYFPEPVTVSWNSGALTSGVHTFPAVLQSSGLYSLSSVVTVPSSSLGTQTYICNVNHKPSNTKVDKKVEPKSCDKTHTCPPCPAPELLGGPSVFLFPPKPKDTLMISRTPEVTCVVVDVSHEDPEVKFNWYVDGVEVHNAKTKPREEQYNSTYRVVSVLTVLHQDWLNGKEYKCKVSNKALPAPIEKTISKAKGQPREPQVYTLPPSREEMTKNQVSLTCLVKGFYPSDIAVEWESNGQPENNYKTTPPVLDSDGSFFLYSKLTVDKSRWQQGNVFSCSVMHEALHNHYTQKSLSLSPGK

SEQ ID NO: 1509 - protein, 119 aa, synthetic construct
  REGION 1..119: note = source = /note="Description of Artificial Sequence: Synthetic polypeptide"
DVVMTQSPLSLPVTPGEPASISCRSSQSLLYRNGHNFLDWYVQKPGQSPQLLIYLGSNRASGVPDRFSGSGSGTDFTLKISRVEAEDVGVYYCMQALQTPPTFGQGTKLEIKRTVAAPS

SEQ ID NO: 1510 - protein, 11 aa, synthetic construct
  REGION 1..11: note = source = /note="Description of Artificial Sequence: Synthetic peptide"
QSLLYRNGHNF

SEQ ID NO: 1511 - skipped

SEQ ID NO: 1512 - protein, 9 aa, synthetic construct
  REGION 1..9: note = source = /note="Description of Artificial Sequence: Synthetic peptide"
MQALQTPPT

SEQ ID NO: 1513 - protein, 219 aa, synthetic construct
  REGION 1..219: note = source = /note="Description of Artificial Sequence: Synthetic polypeptide"
DVVMTQSPLSLPVTPGEPASISCRSSQSLLYRNGHNFLDWYVQKPGQSPQLLIYLGSNRASGVPDRFSGSGSGTDFTLKISRVEAEDVGVYYCMQALQTPPTFGQGTKLEIKRTVAAPSVFIFPPSDEQLKSGTASVVCLLNNFYPREAKVQWKVDNALQSGNSQESVTEQDSKDSTYSLSSTLTLSKADYEKHKVYACEVTHQGLSSPVTKSFNRGEC

SEQ ID NO: 1514 - protein, 121 aa, synthetic construct
  REGION 1..121: note = source = /note="Description of Artificial Sequence: Synthetic polypeptide"
DVQLVESGGDLVQPGGSRKLSCTASGFTFSNFGMHWVRQAPEKGLEWVAYISSGSSTIYYADTVKGRFTISRDNPENTLFLQMTSLRSEDTAMYYCTRLDYYTNSYSMDHWGQGTSVTVSS

SEQ ID NO: 1515 - protein, 8 aa, synthetic construct
  REGION 1..8: note = source = /note="Description of Artificial Sequence: Synthetic peptide"
GFTFSNFG

SEQ ID NO: 1516 - protein, 8 aa, synthetic construct
  REGION 1..8: note = source = /note="Description of Artificial Sequence: Synthetic peptide"
ISSGSSTI

SEQ ID NO: 1517 - protein, 14 aa, synthetic construct
  REGION 1..14: note = source = /note="Description of Artificial Sequence: Synthetic peptide"
TRLDYYTNSYSMDH

SEQ ID NO: 1518 - protein, 106 aa, synthetic construct
  REGION 1..106: note = source = /note="Description of Artificial Sequence: Synthetic polypeptide"
QIVLTQSPALMSASPGEKVTLTCSASSSLPYIYWYQQKPGSSPKPWIYLTSNLASGVPARFSGSRSGTSYSLTISSVEAEDAATYYCQQWSSNPFTFGSGTKLEIK

SEQ ID NO: 1519 - protein, 5 aa, synthetic construct
  REGION 1..5: note = source = /note="Description of Artificial Sequence: Synthetic peptide"
SSLPY

SEQ ID NO: 1520 - skipped

SEQ ID NO: 1521 - protein, 9 aa, synthetic construct
  REGION 1..9: note = source = /note="Description of Artificial Sequence: Synthetic peptide"
QQWSSNPFT

SEQ ID NO: 1522 - protein, 117 aa, synthetic construct
  REGION 1..117: note = source = /note="Description of Artificial Sequence: Synthetic polypeptide"
QVQLQQSGAELAKPGASVKMSCKASGYTFTSNWMHWVKQRPGQGLEWIGYINPSNGYTECNQKFRDKATLSADKSSSTAYMQLNSLTSADSAVYYCALMISAWLPYWGQGTLVTVSA

SEQ ID NO: 1523 - protein, 8 aa, synthetic construct
  REGION 1..8: note = source = /note="Description of Artificial Sequence: Synthetic peptide"
GYTFTSNW

SEQ ID NO: 1524 - protein, 8 aa, synthetic construct
  REGION 1..8: note = source = /note="Description of Artificial Sequence: Synthetic peptide"
INPSNGYT

SEQ ID NO: 1525 - protein, 10 aa, synthetic construct
  REGION 1..10: note = source = /note="Description of Artificial Sequence: Synthetic peptide"
ALMISAWLPY

SEQ ID NO: 1526 - protein, 111 aa, synthetic construct
  REGION 1..111: note = source = /note="Description of Artificial Sequence: Synthetic polypeptide"
DIVLTQSPASLAISLGQRATISCRASQSVSASSYSYVHWYQQKPGQPPKLLIKYASSLESGVPARFSGSGSGTDFTLNIHPVEEEDTATYYCLHTWEIPYTFGGGTKLEIK

SEQ ID NO: 1527 - protein, 10 aa, synthetic construct
  REGION 1..10: note = source = /note="Description of Artificial Sequence: Synthetic peptide"
QSVSASSYSY

SEQ ID NO: 1528 - skipped

SEQ ID NO: 1529 - protein, 9 aa, synthetic construct
  REGION 1..9: note = source = /note="Description of Artificial Sequence: Synthetic peptide"
LHTWEIPYT

SEQ ID NO: 1530 - protein, 116 aa, synthetic construct
  REGION 1..116: note = source = /note="Description of Artificial Sequence: Synthetic polypeptide"
QVQLQQSGAELTRPGASVNLSCKASGYTFTSYWMQWVKQRPGQGLEWIGAIYPGDGDTRFNQKFKGKATLTADESSSTAYMQLSSLASEDSAVYYCATYYRYDDYWGQGTTLTVSS

SEQ ID NO: 1531 - protein, 8 aa, synthetic construct
  REGION 1..8: note = source = /note="Description of Artificial Sequence: Synthetic peptide"
GYTFTSYW

SEQ ID NO: 1532 - protein, 8 aa, synthetic construct
  REGION 1..8: note = source = /note="Description of Artificial Sequence: Synthetic peptide"
IYPGDGDT

SEQ ID NO: 1533 - protein, 9 aa, synthetic construct
  REGION 1..9: note = source = /note="Description of Artificial Sequence: Synthetic peptide"
ATYYRYDDY

SEQ ID NO: 1534 - protein, 106 aa, synthetic construct
  REGION 1..106: note = source = /note="Description of Artificial Sequence: Synthetic polypeptide"
QIVLTQSPAIMSASPGEKVTMTCSASSSVSYMHWYQQKSGTSPKRWIYDTSKLASGVPTRFSGSGSGTSYSLTISSMEAEDAATYYCQQWSSNPYTFGGGTKLEIK

SEQ ID NO: 1535 - protein, 5 aa, synthetic construct
  REGION 1..5: note = source = /note="Description of Artificial Sequence: Synthetic peptide"
SSVSY

SEQ ID NO: 1536 - skipped

SEQ ID NO: 1537 - protein, 9 aa, synthetic construct
  REGION 1..9: note = source = /note="Description of Artificial Sequence: Synthetic peptide"
QQWSSNPYT

SEQ ID NO: 1538 - protein, 122 aa, synthetic construct
  REGION 1..122: note = source = /note="Description of Artificial Sequence: Synthetic polypeptide"
EVQLQQSGPDLVKPGASMKISCKASGYTFIDYNIHWVKQSQGKSLDWIGYIYPYNGGTGYNQKFKNKATLTVDSSSSTAYMEVRSLTFEDSAVYFCAREADYYGNRGQFDYWGQGTLVTVSA

SEQ ID NO: 1539 - protein, 8 aa, synthetic construct
  REGION 1..8: note = source = /note="Description of Artificial Sequence: Synthetic peptide"
GYTFIDYN

SEQ ID NO: 1540 - protein, 8 aa, synthetic construct
  REGION 1..8: note = source = /note="Description of Artificial Sequence: Synthetic peptide"
IYPYNGGT

SEQ ID NO: 1541 - protein, 15 aa, synthetic construct
  REGION 1..15: note = source = /note="Description of Artificial Sequence: Synthetic peptide"
AREADYYGNRGQFDY

SEQ ID NO: 1542 - protein, 107 aa, synthetic construct
  REGION 1..107: note = source = /note="Description of Artificial Sequence: Synthetic polypeptide"
DIQMTQSPASLSVSVGETVTITCRASENIFSNLAWYQQKQGKSPQLLVYGEANLADGVPSRFSGSGSGTQYSLKINSLQSEDFGNYYCQHFWGTPYTFGGGTTLEIK

SEQ ID NO: 1543 - protein, 6 aa, synthetic construct
  REGION 1..6: note = source = /note="Description of Artificial Sequence: Synthetic peptide"
ENIFSN

SEQ ID NO: 1544 - skipped

SEQ ID NO: 1545 - protein, 9 aa, synthetic construct
  REGION 1..9: note = source = /note="Description of Artificial Sequence: Synthetic peptide"
QHFWGTPYT

SEQ ID NO: 1546 - protein, 120 aa, synthetic construct
  REGION 1..120: note = source = /note="Description of Artificial Sequence: Synthetic polypeptide"
QVTLKESGPGILQPSQTLSLTCSFSGFSLNTSGTGVGWIRQPSGKGLEWLTHIWWNDNKFYNTFLKSRLTISKETSNNQVFLKIASVDTADAATYYCARMAYGNLWFVNWGQGTLVAVST

SEQ ID NO: 1547 - protein, 10 aa, synthetic construct
  REGION 1..10: note = source = /note="Description of Artificial Sequence: Synthetic peptide"
GFSLNTSGTG

SEQ ID NO: 1548 - protein, 7 aa, synthetic construct
  REGION 1..7: note = source = /note="Description of Artificial Sequence: Synthetic peptide"
IWWNDNK

SEQ ID NO: 1549 - protein, 12 aa, synthetic construct
  REGION 1..12: note = source = /note="Description of Artificial Sequence: Synthetic peptide"
ARMAYGNLWFVN

SEQ ID NO: 1550 - protein, 111 aa, synthetic construct
  REGION 1..111: note = source = /note="Description of Artificial Sequence: Synthetic polypeptide"
DIVLTQSPASLAVSLGQRASISCRASRSVTISGYSYMYWYQQKPGQPPRLLFYLASNLASGVPARFSGSGSGTDFTLNIHPVEEEDAAIYYCQHSRELPYTFGGGTKLEIK

SEQ ID NO: 1551 - protein, 10 aa, synthetic construct
  REGION 1..10: note = source = /note="Description of Artificial Sequence: Synthetic peptide"
RSVTISGYSY

SEQ ID NO: 1552 - skipped

SEQ ID NO: 1553 - protein, 9 aa, synthetic construct
  REGION 1..9: note = source = /note="Description of Artificial Sequence: Synthetic peptide"
QHSRELPYT

SEQ ID NO: 1554 - protein, 123 aa, synthetic construct
  REGION 1..123: note = source = /note="Description of Artificial Sequence: Synthetic polypeptide"
QIQLVQSGPELKKPRETVKISCKASGYTFTDYSMHWVKQAPGKGLKWMGWINTETGEPTYADDFKGRFAFSLEASASSAYLQINILKDEDTATYFCARSRGGYYEDYYALDYWGQGTSVTVSS

SEQ ID NO: 1555 - protein, 8 aa, synthetic construct
  REGION 1..8: note = source = /note="Description of Artificial Sequence: Synthetic peptide"
GYTFTDYS

SEQ ID NO: 1556 - protein, 8 aa, synthetic construct
  REGION 1..8: note = source = /note="Description of Artificial Sequence: Synthetic peptide"
INTETGEP

SEQ ID NO: 1557 - protein, 16 aa, synthetic construct
  REGION 1..16: note = source = /note="Description of Artificial Sequence: Synthetic peptide"
ARSRGGYYEDYYALDY

SEQ ID NO: 1558 - protein, 107 aa, synthetic construct
  REGION 1..107: note = source = /note="Description of Artificial Sequence: Synthetic polypeptide"
DIQMTQSPASLSASVGESVTITCRASGNIHYYLAWYQQKQGKSPQLLVYNAKNLADGVPSRFSGSGSGTQFSLKINSLQPEDFGSYYCQHFWISPPTFGGGTKLEIK

SEQ ID NO: 1559 - protein, 6 aa, synthetic construct
  REGION 1..6: note = source = /note="Description of Artificial Sequence: Synthetic peptide"
GNIHYY

SEQ ID NO: 1560 - skipped

SEQ ID NO: 1561 - protein, 9 aa, synthetic construct
  REGION 1..9: note = source = /note="Description of Artificial Sequence: Synthetic peptide"
QHFWISPPT

SEQ ID NO: 1562 - protein, 118 aa, synthetic construct
  REGION 1..118: note = source = /note="Description of Artificial Sequence: Synthetic polypeptide"
EVQLRQSGADLVKPGASVKLSCTASGFNIKDTYIDWVKQRPEQGLDWIGRIDPANGNTKYDPKFQGKATIITDTSSNTAYLQLSNLTSEDTAVYYCARYGSYPYFDYWGRGTTLAVSS

SEQ ID NO: 1563 - protein, 8 aa, synthetic construct
  REGION 1..8: note = source = /note="Description of Artificial Sequence: Synthetic peptide"
GFNIKDTY

SEQ ID NO: 1564 - protein, 8 aa, synthetic construct
  REGION 1..8: note = source = /note="Description of Artificial Sequence: Synthetic peptide"
IDPANGNT

SEQ ID NO: 1565 - protein, 11 aa, synthetic construct
  REGION 1..11: note = source = /note="Description of Artificial Sequence: Synthetic peptide"
ARYGSYPYFDY

SEQ ID NO: 1566 - protein, 107 aa, synthetic construct
  REGION 1..107: note = source = /note="Description of Artificial Sequence: Synthetic polypeptide"
SIVMTQTPKFLLISAGDRVTITCKASQSVRNDVAWYQQKPGQSPKLLMYYASNRYTGVPDRFTGSGYGTDFTFTISTVQAEDLAVYFCQQDYSSPPTFGGGTKLEIK

SEQ ID NO: 1567 - protein, 6 aa, synthetic construct
  REGION 1..6: note = source = /note="Description of Artificial Sequence: Synthetic peptide"
QSVRND

SEQ ID NO: 1568 - skipped

SEQ ID NO: 1569 - protein, 9 aa, synthetic construct
  REGION 1..9: note = source = /note="Description of Artificial Sequence: Synthetic peptide"
QQDYSSPPT

SEQ ID NO: 1570 - protein, 118 aa, synthetic construct
  REGION 1..118: note = source = /note="Description of Artificial Sequence: Synthetic polypeptide"
QVQLQQSGPELVRPGVSVKISCKVSGYTFTDYVMHWVKQSHAKSLEWIGIISPYSGNTNYNQNFKGKATMTVDKSSSTAYMALARLTSEDSAIYYCAREGDLPMFAYWGQGTLVTVSA

SEQ ID NO: 1571 - protein, 8 aa, synthetic construct
  REGION 1..8: note = source = /note="Description of Artificial Sequence: Synthetic peptide"
GYTFTDYV

SEQ ID NO: 1572 - protein, 8 aa, synthetic construct
  REGION 1..8: note = source = /note="Description of Artificial Sequence: Synthetic peptide"
ISPYSGNT

SEQ ID NO: 1573 - protein, 11 aa, synthetic construct
  REGION 1..11: note = source = /note="Description of Artificial Sequence: Synthetic peptide"
AREGDLPMFAY

SEQ ID NO: 1574 - protein, 106 aa, synthetic construct
  REGION 1..106: note = source = /note="Description of Artificial Sequence: Synthetic polypeptide"
QIVLTQSPTIMSASPGEKVTMTCSASSSVSYIYWYQQNPGSSPRLLIYDTSILASGVPFRFSGSGSGTSYSLTISRMEAEDAATYYCQQWTSYPLTFGSGTKLELK

SEQ ID NO: 1575 - protein, 5 aa, synthetic construct
  REGION 1..5: note = source = /note="Description of Artificial Sequence: Synthetic peptide"
SSVSY

SEQ ID NO: 1576 - skipped

SEQ ID NO: 1577 - protein, 9 aa, synthetic construct
  REGION 1..9: note = source = /note="Description of Artificial Sequence: Synthetic peptide"
QQWTSYPLT

SEQ ID NO: 1578 - protein, 120 aa, synthetic construct
  REGION 1..120: note = source = /note="Description of Artificial Sequence: Synthetic polypeptide"
EVQLQQSGPELVKPGASVKISCKASGYTFTDYNINWVKQSHGKSLEWIGYIYPYIGGSGYNQKFKSKATLSADNPSSTAYMELRSLTSEDSAVYYCAREDKTARNAMDYWGQGTPVTVSS

SEQ ID NO: 1579 - protein, 8 aa, synthetic construct
  REGION 1..8: note = source = /note="Description of Artificial Sequence: Synthetic peptide"
GYTFTDYN

SEQ ID NO: 1580 - protein, 8 aa, synthetic construct
  REGION 1..8: note = source = /note="Description of Artificial Sequence: Synthetic peptide"
IYPYIGGS

SEQ ID NO: 1581 - protein, 13 aa, synthetic construct
  REGION 1..13: note = source = /note="Description of Artificial Sequence: Synthetic peptide"
AREDKTARNAMDY

SEQ ID NO: 1582 - protein, 107 aa, synthetic construct
  REGION 1..107: note = source = /note="Description of Artificial Sequence: Synthetic polypeptide"
DIQMTQSPASLSVSVGETVTIICRVSENIYSNLAWYQQKQGKSPQLLVYEATNLAEGVPSRFSGSGSGTQYSLKINSLQSEDFGSYYCQHFWGTPYTFGGGTKLEIK

SEQ ID NO: 1583 - protein, 6 aa, synthetic construct
  REGION 1..6: note = source = /note="Description of Artificial Sequence: Synthetic peptide"
ENIYSN

SEQ ID NO: 1584 - skipped

SEQ ID NO: 1585 - protein, 9 aa, synthetic construct
  REGION 1..9: note = source = /note="Description of Artificial Sequence: Synthetic peptide"
QHFWGTPYT

SEQ ID NO: 1586 - protein, 120 aa, synthetic construct
  REGION 1..120: note = source = /note="Description of Artificial Sequence: Synthetic polypeptide"
DVQLQESGPGLVKPSQSLSLTCTVTGYSITSDYAWNWIRQFPGNKLEWMGYISYSGSTSYNPSLKSRISITRDTSKNQFFLQLNSVTTEDTATYYCARHYRYPPYAMDYWGQGTSVTVSS

SEQ ID NO: 1587 - protein, 9 aa, synthetic construct
  REGION 1..9: note = source = /note="Description of Artificial Sequence: Synthetic peptide"
GYSITSDYA

SEQ ID NO: 1588 - protein, 7 aa, synthetic construct
  REGION 1..7: note = source = /note="Description of Artificial Sequence: Synthetic peptide"
ISYSGST

SEQ ID NO: 1589 - protein, 13 aa, synthetic construct
  REGION 1..13: note = source = /note="Description of Artificial Sequence: Synthetic peptide"
ARHYRYPPYAMDY

SEQ ID NO: 1590 - protein, 113 aa, synthetic construct
  REGION 1..113: note = source = /note="Description of Artificial Sequence: Synthetic polypeptide"
DIVMTQSPSSLAMSVGQKVTMSCKSSQSLLNSSNQKNYLAWYQQKPGQSPKLLVYFASTRESGVPDRFIGSGSGTDFTLTITSVQAEDLADYFCQQHYSTPFTFGSGTKLEIK

SEQ ID NO: 1591 - protein, 12 aa, synthetic construct
  REGION 1..12: note = source = /note="Description of Artificial Sequence: Synthetic peptide"
QSLLNSSNQKNY

SEQ ID NO: 1592 - skipped

SEQ ID NO: 1593 - protein, 9 aa, synthetic construct
  REGION 1..9: note = source = /note="Description of Artificial Sequence: Synthetic peptide"
QQHYSTPFT

SEQ ID NO: 1594 - protein, 118 aa, synthetic construct
  REGION 1..118: note = source = /note="Description of Artificial Sequence: Synthetic polypeptide"
QVQLKQSGPGLVQPSQSLSITCTVSGFSLTSFGVHWVRQSPGKGLEWLGVIWSGGTTVYDAAFISRLSISKDNSKSQVFFKMNSLQTNDTAIYYCARKRGNFYVMDYWGQGTSVTVSS

SEQ ID NO: 1595 - protein, 8 aa, synthetic construct
  REGION 1..8: note = source = /note="Description of Artificial Sequence: Synthetic peptide"
GFSLTSFG

SEQ ID NO: 1596 - protein, 7 aa, synthetic construct
  REGION 1..7: note = source = /note="Description of Artificial Sequence: Synthetic peptide"
IWSGGTT

SEQ ID NO: 1597 - protein, 12 aa, synthetic construct
  REGION 1..12: note = source = /note="Description of Artificial Sequence: Synthetic peptide"
ARKRGNFYVMDY

SEQ ID NO: 1598 - protein, 113 aa, synthetic construct; identical to SEQ ID NO: 1590
  REGION 1..113: note = source = /note="Description of Artificial Sequence: Synthetic polypeptide"

SEQ ID NO: 1599 - protein, 12 aa, synthetic construct
  REGION 1..12: note = source = /note="Description of Artificial Sequence: Synthetic peptide"
QSLLNSSNQKNY

SEQ ID NO: 1600 - skipped

SEQ ID NO: 1601 - protein, 9 aa, synthetic construct
  REGION 1..9: note = source = /note="Description of Artificial Sequence: Synthetic peptide"
QQHYSTPFT

SEQ ID NO: 1602 - protein, 118 aa, synthetic construct
  REGION 1..118: note = source = /note="Description of Artificial Sequence: Synthetic polypeptide"
QVQLQQPGSELVRPGTSVKLSCKASGYTFTSYWVHWVRQRHGQGLEWIGNVYPGSGSTNYDEKFKSKGTLTVDTSSSTAYMHLSSLTSEDSAVYYCTRGVLRFPLDYWGQGTTLTVSS

SEQ ID NO: 1603 - protein, 8 aa, synthetic construct
  REGION 1..8: note = source = /note="Description of Artificial Sequence: Synthetic peptide"
GYTFTSYW

SEQ ID NO: 1604 - protein, 8 aa, synthetic construct
  REGION 1..8: note = source = /note="Description of Artificial Sequence: Synthetic peptide"
VYPGSGST

SEQ ID NO: 1605 - protein, 11 aa, synthetic construct
  REGION 1..11: note = source = /note="Description of Artificial Sequence: Synthetic peptide"
TRGVLRFPLDY

SEQ ID NO: 1606 - protein, 112 aa, synthetic construct
  REGION 1..112: note = source = /note="Description of Artificial Sequence: Synthetic polypeptide"
DIVMTQAAPSVPVTPGESVSISCRSSKSLLHSNGNTYLYWFLQRPGQSPHLLIYRMSNLASGVPDRFSGSGSGTAFTLRISRVEAEDVGVYYCMQHLEYPLTFGAGTKLELK

SEQ ID NO: 1607 - protein, 11 aa, synthetic construct
  REGION 1..11: note = source = /note="Description of Artificial Sequence: Synthetic peptide"
KSLLHSNGNTY

SEQ ID NO: 1608 - skipped

SEQ ID NO: 1609 - protein, 9 aa, synthetic construct
  REGION 1..9: note = source = /note="Description of Artificial Sequence: Synthetic peptide"
MQHLEYPLT

SEQ ID NO: 1610 - protein, 118 aa, synthetic construct
  REGION 1..118: note = source = /note="Description of Artificial Sequence: Synthetic polypeptide"
QVQLQQSGPEVVRPGVSVKISCKGSGYKFPDYVMHWVKQSHAKSLEWIGIISIYSGNTNYNQKFKGKATMTVDKSSSTAYMELARLTSEDSAIYYCAREGDLPMFAYWGQGTLVTVSA

SEQ ID NO: 1611 - protein, 8 aa, synthetic construct
  REGION 1..8: note = source = /note="Description of Artificial Sequence: Synthetic peptide"
GYKFPDYV

SEQ ID NO: 1612 - protein, 8 aa, synthetic construct
  REGION 1..8: note = source = /note="Description of Artificial Sequence: Synthetic peptide"
ISIYSGNT

SEQ ID NO: 1613 - protein, 11 aa, synthetic construct
  REGION 1..11: note = source = /note="Description of Artificial Sequence: Synthetic peptide"
AREGDLPMFAY

SEQ ID NO: 1614 - protein, 106 aa, synthetic construct
  REGION 1..106: note = source = /note="Description of Artificial Sequence: Synthetic polypeptide"
QIVLTQSPAIMSASPGEKVTMTCNASSSVSYMYWYQQKPISSPRLLIYDTSNLASGVPVRFSGSGSGTSYSLTIGRMEAEDAATYYCQQWSSYPLTFGAGTKVEVK

SEQ ID NO: 1615 - protein, 5 aa, synthetic construct
  REGION 1..5: note = source = /note="Description of Artificial Sequence: Synthetic peptide"
SSVSY

SEQ ID NO: 1616 - skipped

SEQ ID NO: 1617 - protein, 9 aa, synthetic construct
  REGION 1..9: note = source = /note="Description of Artificial Sequence: Synthetic peptide"
QQWSSYPLT

SEQ ID NO: 1618 - protein, 122 aa, synthetic construct
  REGION 1..122: note = source = /note="Description of Artificial Sequence: Synthetic polypeptide"
QVQLKESGPGLVAPSQSLSITCTVSGFSLTAYNINWVRQPPGKGLEWLGMIWGDGNTDYNSPLKSRLTISKDNSKSQVFLKMDSLQTDDTARYYCARDLKVRRDSPYTMDYWGQGTSVTVSS

SEQ ID NO: 1619 - protein, 8 aa, synthetic construct
  REGION 1..8: note = source = /note="Description of Artificial Sequence: Synthetic peptide"
GFSLTAYN

SEQ ID NO: 1620 - protein, 7 aa, synthetic construct
  REGION 1..7: note = source = /note="Description of Artificial Sequence: Synthetic peptide"
IWGDGNT

SEQ ID NO: 1621 - protein, 16 aa, synthetic construct
  REGION 1..16: note = source = /note="Description of Artificial Sequence: Synthetic peptide"
ARDLKVRRDSPYTMDY

SEQ ID NO: 1622 - protein, 112 aa, synthetic construct
  REGION 1..112: note = source = /note="Description of Artificial Sequence: Synthetic polypeptide"
NIMMTQSPSSLAVSAGEKVTMSCKSSQSVLYSSNQKNYLAWYQQKPGQSPKLLIYWASNRESGVPDRFTGSGSGTDFTLTISSVQAEDLAVYYCHQYLSSYTFGGGTKLEIK

SEQ ID NO: 1623 - protein, 12 aa, synthetic construct
  REGION 1..12: note = source = /note="Description of Artificial Sequence: Synthetic peptide"
QSVLYSSNQKNY

SEQ ID NO: 1624 - skipped

SEQ ID NO: 1625 - protein, 8 aa, synthetic construct
  REGION 1..8: note = source = /note="Description of Artificial Sequence: Synthetic peptide"
HQYLSSYT

SEQ ID NO: 1626 - protein, 124 aa, synthetic construct
  REGION 1..124: note = source = /note="Description of Artificial Sequence: Synthetic polypeptide"
DVQLQESGPGLVKPSQSLSLTCTVTGYSLTSDYAWNWIRQFPGNKLEWMGYITYSGGTTYNPSLKSRISITRDTSKNQFFLQLTSVTTEDTATYYCARRGSGTTVVGDWYFDVWGAGTTVTVSS

SEQ ID NO: 1627 - protein, 9 aa, synthetic construct
  REGION 1..9: note = source = /note="Description of Artificial Sequence: Synthetic peptide"
GYSLTSDYA

SEQ ID NO: 1628 - protein, 7 aa, synthetic construct
  REGION 1..7: note = source = /note="Description of Artificial Sequence: Synthetic peptide"
ITYSGGT

SEQ ID NO: 1629 - protein, 17 aa, synthetic construct
  REGION 1..17: note = source = /note="Description of Artificial Sequence: Synthetic peptide"
ARRGSGTTVVGDWYFDV

SEQ ID NO: 1630 - protein, 113 aa, synthetic construct
  REGION 1..113: note = source = /note="Description of Artificial Sequence: Synthetic polypeptide"
DIVMSQSPSSLAVSVGEKVTMSCKSSQSLLYSFNQKYYLAWYQQKPGQSPKLLIYWASTRESGVPDRFTGSGSGTDFTPTISSVTAEDLAVYYCQQFYTYPYTFGGGTKLEMK

SEQ ID NO: 1631 - protein, 12 aa, synthetic construct
  REGION 1..12: note = source = /note="Description of Artificial Sequence: Synthetic peptide"
QSLLYSFNQKYY

SEQ ID NO: 1632 - skipped

SEQ ID NO: 1633 - protein, 9 aa, synthetic construct
  REGION 1..9: note = source = /note="Description of Artificial Sequence: Synthetic peptide"
QQFYTYPYT

SEQ ID NO: 1634 - protein, 122 aa, synthetic construct
  REGION 1..122: note = source = /note="Description of Artificial Sequence: Synthetic polypeptide"
EVQVQQSGPELVKPGASVKISCKASGYTFTKSNMHWVKQSHGKSLEWIGYIYPYNGGTGYNQNFKSKATLTVDISSSTAYMELRSLTLEDSAVYLCAREADYYGNRGQFDYWGQGTLVTVSA

SEQ ID NO: 1635 - protein, 8 aa, synthetic construct
  REGION 1..8: note = source = /note="Description of Artificial Sequence: Synthetic peptide"
GYTFTKSN

SEQ ID NO: 1636 - protein, 8 aa, synthetic construct
  REGION 1..8: note = source = /note="Description of Artificial Sequence: Synthetic peptide"
IYPYNGGT

SEQ ID NO: 1637 - protein, 15 aa, synthetic construct
  REGION 1..15: note = source = /note="Description of Artificial Sequence: Synthetic peptide"
AREADYYGNRGQFDY

SEQ ID NO: 1638 - protein, 107 aa, synthetic construct
  REGION 1..107: note = source = /note="Description of Artificial Sequence: Synthetic polypeptide"
DIQMTQSPASLSVSVGETVTITCRASDNIFSNLAWYHQKQGKSPHLLVYGATNLADGVPSRFSGSGSGTQYSLKINSLQSEDFGDYYCQHFWGTPYTFGGGTKLEIK

SEQ ID NO: 1639 - protein, 6 aa, synthetic construct
  REGION 1..6: note = source = /note="Description of Artificial Sequence: Synthetic peptide"
DNIFSN

SEQ ID NO: 1640 - skipped

SEQ ID NO: 1641 - protein, 9 aa, synthetic construct
  REGION 1..9: note = source = /note="Description of Artificial Sequence: Synthetic peptide"
QHFWGTPYT

SEQ ID NO: 1642 - protein, 119 aa, synthetic construct
  REGION 1..119: note = source = /note="Description of Artificial Sequence: Synthetic polypeptide"
QVQLQQSGAELMRPGTSVKVSCKASGYAFTNHLIEWIKQRPGQGLEWIGVINPGSDSTDYNEKFKDKATLTADKSSSTAYMQLSSLTSDDSAVYFCARSLYYNSWFVYWGQGTLVTVSA

SEQ ID NO: 1643 - protein, 8 aa, synthetic construct
  REGION 1..8: note = source = /note="Description of Artificial Sequence: Synthetic peptide"
GYAFTNHL

SEQ ID NO: 1644 - protein, 8 aa, synthetic construct
  REGION 1..8: note = source = /note="Description of Artificial Sequence: Synthetic peptide"
INPGSDST

SEQ ID NO: 1645 - protein, 12 aa, synthetic construct
  REGION 1..12: note = source = /note="Description of Artificial Sequence: Synthetic peptide"
ARSLYYNSWFVY

SEQ ID NO: 1646 - protein, 107 aa, synthetic construct
  REGION 1..107: note = source = /note="Description of Artificial Sequence: Synthetic polypeptide"
DIQMTQSPASLSASVGETVTITCRASENIYSYLAWYQQKRGKSPQLLVYNAKTLVEGVPSRFSGSGSGTQFSLKINSLQPEDFGSYYCQHHYGTPYTFGGGTKLEIK

SEQ ID NO: 1647 - protein, 6 aa, synthetic construct
  REGION 1..6: note = source = /note="Description of Artificial Sequence: Synthetic peptide"
ENIYSY

SEQ ID NO: 1648 - skipped

SEQ ID NO: 1649 - protein, 9 aa, synthetic construct
  REGION 1..9: note = source = /note="Description of Artificial Sequence: Synthetic peptide"
QHHYGTPYT

SEQ ID NO: 1650 - protein, 118 aa, synthetic construct
  REGION 1..118: note = source = /note="Description of Artificial Sequence: Synthetic polypeptide"
EVQLQQSGAELVKPGASVRLSCTASGFSIRDTYIHWVKQRPEQGLDWIGKIDPANGKSEYDPKFQGRATMTTDTSSNTAYLQLSSLTSEDTAVYYCTRYGYYPYFDVWGAGTTVTVFS

SEQ ID NO: 1651 - protein, 8 aa, synthetic construct
  REGION 1..8: note = source = /note="Description of Artificial Sequence: Synthetic peptide"
GFSIRDTY

SEQ ID NO: 1652 - protein, 8 aa, synthetic construct
  REGION 1..8: note = source = /note="Description of Artificial Sequence: Synthetic peptide"
IDPANGKS

SEQ ID NO: 1653 - protein, 11 aa, synthetic construct
  REGION 1..11: note = source = /note="Description of Artificial Sequence: Synthetic peptide"
TRYGYYPYFDV

SEQ ID NO: 1654 - protein, 107 aa, synthetic construct
  REGION 1..107: note = source = /note="Description of Artificial Sequence: Synthetic polypeptide"
SIVMTQTPKFLLVSAGDRVAITCKASQSVRHDVVWYQQKPGQSPKLLIYYASSRYTGVPDRFTGSGYGTDFTFTISTVQAEDLALYFCLQDFSSPWTFGGGTKLEIK

SEQ ID NO: 1655 - protein, 6 aa, synthetic construct
  REGION 1..6: note = source = /note="Description of Artificial Sequence: Synthetic peptide"
QSVRHD

SEQ ID NO: 1656 - skipped

SEQ ID NO: 1657 - protein, 9 aa, synthetic construct
  REGION 1..9: note = source = /note="Description of Artificial Sequence: Synthetic peptide"
LQDFSSPWT

SEQ ID NO: 1658 - protein, 120 aa, synthetic construct
  REGION 1..120: note = source = /note="Description of Artificial Sequence: Synthetic polypeptide"
EVQLQQSGPELVKPGASVKISCKTSGYTFTKNTMHWVRQSHGKSLEWIGGINPNSGGASFNQKFMGKATLTVDKSSSTAYMELRSLTSEDSAVYYCARDGYDGDWFFDVWGAGTTVTVSS

SEQ ID NO: 1659 - protein, 8 aa, synthetic construct
  REGION 1..8: note = source = /note="Description of Artificial Sequence: Synthetic peptide"
GYTFTKNT

SEQ ID NO: 1660 - protein, 8 aa, synthetic construct
  REGION 1..8: note = source = /note="Description of Artificial Sequence: Synthetic peptide"
INPNSGGA

SEQ ID NO: 1661 - protein, 13 aa, synthetic construct
  REGION 1..13: note = source = /note="Description of Artificial Sequence: Synthetic peptide"
ARDGYDGDWFFDV

SEQ ID NO: 1662 - protein, 107 aa, synthetic construct
  REGION 1..107: note = source = /note="Description of Artificial Sequence: Synthetic polypeptide"
DIQMNQSPFSLSASLGDTVTITCHASQNIYVWLSWYQQKPGNIPKLLIYKASDLHTGVPSRFSGSGSGTDFTLNISSLQPEDIATYYCQQGQSYPRTFGGGTKLEIK

SEQ ID NO: 1663 - protein, 6 aa, synthetic construct
  REGION 1..6: note = source = /note="Description of Artificial Sequence: Synthetic peptide"
QNIYVW

SEQ ID NO: 1664 - skipped

SEQ ID NO: 1665 - protein, 9 aa, synthetic construct
  REGION 1..9: note = source = /note="Description of Artificial Sequence: Synthetic peptide"
QQGQSYPRT

SEQ ID NO: 1666 - protein, 114 aa, synthetic construct
  REGION 1..114: note = source = /note="Description of Artificial Sequence: Synthetic polypeptide"
QVQLKESGPGLVAPSQSLSITCTVSGFSLIGHGVNWIRQPPGKGLEWLGVIWGDGNTDYNSALKSRLSISKDNSKSQVFLKMNSLQTDDTARYFCAVNSAMDYWGQGTAVTVSS

SEQ ID NO: 1667 - protein, 8 aa, synthetic construct
  REGION 1..8: note = source = /note="Description of Artificial Sequence: Synthetic peptide"
GFSLIGHG

SEQ ID NO: 1668 - protein, 7 aa, synthetic construct
  REGION 1..7: note = source = /note="Description of Artificial Sequence: Synthetic peptide"
IWGDGNT

SEQ ID NO: 1669 - protein, 8 aa, synthetic construct
  REGION 1..8: note = source = /note="Description of Artificial Sequence: Synthetic peptide"
AVNSAMDY

SEQ ID NO: 1670 - protein, 107 aa, synthetic construct
  REGION 1..107: note = source = /note="Description of Artificial Sequence: Synthetic polypeptide"
NIVMTQSPKSMSMSVGERVTLNCTASENVASFVSWYQQKPEQSPKLLIYGTSNRYTGVPDRFTGSGSATDFTLTISSVQAEDLGDYHCGQSYNYPFTFGSGTKLEIE

SEQ ID NO: 1671 - protein, 6 aa, synthetic construct
  REGION 1..6: note = source = /note="Description of Artificial Sequence: Synthetic peptide"
ENVASF

SEQ ID NO: 1672 - skipped

SEQ ID NO: 1673 - protein, 9 aa, synthetic construct
  REGION 1..9: note = source = /note="Description of Artificial Sequence: Synthetic peptide"
GQSYNYPFT

SEQ ID NO: 1674 - protein, 119 aa, synthetic construct
  REGION 1..119: note = source = /note="Description of Artificial Sequence: Synthetic polypeptide"
QVQLQQSGAELVRPGASVKVSCKTSGYAFTNYLIEWVKQRPGQGLEWIGVINPGSGGIYYNDKFKVKTTLTADKSSSTAYMQLSSLTSDDSAVYFCARSETHDTWFAYWGQGTLVTVSA

SEQ ID NO: 1675 - protein, 8 aa, synthetic construct
  REGION 1..8: note = source = /note="Description of Artificial Sequence: Synthetic peptide"
GYAFTNYL

SEQ ID NO: 1676 - protein, 8 aa, synthetic construct
  REGION 1..8: note = source = /note="Description of Artificial Sequence: Synthetic peptide"
INPGSGGI

SEQ ID NO: 1677 - protein, 12 aa, synthetic construct
  REGION 1..12: note = source = /note="Description of Artificial Sequence: Synthetic peptide"
ARSETHDTWFAY

SEQ ID NO: 1678 - protein, 108 aa, synthetic construct
  REGION 1..108: note = source = /note="Description of Artificial Sequence: Synthetic polypeptide"
DIVMTQSQKFISTSVGDRVSITCKASQSVRIAVAWFQQKPGQSPKALIYLASTRHTGVPDRFTGSGSGTDFTLTISNVQSEDLADYFCLQHWNYPYTFGGGTKLEIKR

SEQ ID NO: 1679 - protein, 6 aa, synthetic construct
  REGION 1..6: note = source = /note="Description of Artificial Sequence: Synthetic peptide"
QSVRIA

SEQ ID NO: 1680 - skipped

SEQ ID NO: 1681 - protein, 9 aa, synthetic construct
  REGION 1..9: note = source = /note="Description of Artificial Sequence: Synthetic peptide"
LQHWNYPYT

SEQ ID NO: 1682 - protein, 120 aa, synthetic construct
  REGION 1..120: note = source = /note="Description of Artificial Sequence: Synthetic polypeptide"
QVQLQQSGAELVRPGTSVKMSCKAAGYTFTNYWIGWVKQRPGHGLEWIGDIYPGGGYTNYNEKFKGKATLTADTSSSTAYMQLSSLTSEDSAIYYCASPYYGSSYGFAFWGQGTLVTVSA

SEQ ID NO: 1683 - protein, 8 aa, synthetic construct
  REGION 1..8: note = source = /note="Description of Artificial Sequence: Synthetic peptide"
GYTFTNYW

SEQ ID NO: 1684 - protein, 8 aa, synthetic construct
  REGION 1..8: note = source = /note="Description of Artificial Sequence: Synthetic peptide"
IYPGGGYT

SEQ ID NO: 1685 - protein, 13 aa, synthetic construct
  REGION 1..13: note = source = /note="Description of Artificial Sequence: Synthetic peptide"
ASPYYGSSYGFAF

SEQ ID NO: 1686 - protein, 108 aa, synthetic construct; identical to SEQ ID NO: 1678
  REGION 1..108: note = source = /note="Description of Artificial Sequence: Synthetic polypeptide"

SEQ ID NO: 1687 - protein, 6 aa, synthetic construct
  REGION 1..6: note = source = /note="Description of Artificial Sequence: Synthetic peptide"
QSVRIA

SEQ ID NO: 1688 - skipped

SEQ ID NO: 1689 - protein, 9 aa, synthetic construct
  REGION 1..9: note = source = /note="Description of Artificial Sequence: Synthetic peptide"
LQHWNYPYT

SEQ ID NO: 1690 - protein, 117 aa, synthetic construct
  REGION 1..117: note = source = /note="Description of Artificial Sequence: Synthetic polypeptide"
QVQLKESGPGLVAPSQSLSITCTVSGFSLSGYGIKWVRQPPGKGLEWLGTIWGDGSTDYNSALKSRLSISKDNSKSQVFLKMTSLQTDDTARYYCASDSLGITFGYWGQGTLVTVSA

SEQ ID NO: 1691 - protein, 8 aa, synthetic construct
  REGION 1..8: note = source = /note="Description of Artificial Sequence: Synthetic peptide"
GFSLSGYG

SEQ ID NO: 1692 - protein, 7 aa, synthetic construct
  REGION 1..7: note = source = /note="Description of Artificial Sequence: Synthetic peptide"
IWGDGST

SEQ ID NO: 1693 - protein, 11 aa, synthetic construct
  REGION 1..11: note = source = /note="Description of Artificial Sequence: Synthetic peptide"
ASDSLGITFGY

SEQ ID NO: 1694 - protein, 107 aa, synthetic construct
  REGION 1..107: note = source = /note="Description of Artificial Sequence: Synthetic polypeptide"
DIQMTQTTSSLSASLGDRVTISCRASQDISNYLNWYQQKPDGTVKLLIYYTSRLHSGVPSRFSGSGSGTDYSLTISNLEQEDIATYFCQQGNTLPLTFGAGTKLELK

SEQ ID NO: 1695 - protein, 6 aa, synthetic construct
  REGION 1..6: note = source = /note="Description of Artificial Sequence: Synthetic peptide"
QDISNY

SEQ ID NO: 1696 - skipped

SEQ ID NO: 1697 - protein, 9 aa, synthetic construct
  REGION 1..9: note = source = /note="Description of Artificial Sequence: Synthetic peptide"
QQGNTLPLT

SEQ ID NO: 1698 - protein, 120 aa, synthetic construct
  REGION 1..120: note = source = /note="Description of Artificial Sequence: Synthetic polypeptide"
QVQLKESGPGLVAPSQSLSITCTVSGFSLTSYAITWVRQPPGKGLEWLGVIWPGGGTNYNSALKSRLSISKDNSKSHLFLKMNSLQTDDTARYYCVRSYDGYLDWYFDVWGTGTTVTVSS

SEQ ID NO: 1699 - protein, 8 aa, synthetic construct
  REGION 1..8: note = source = /note="Description of Artificial Sequence: Synthetic peptide"
GFSLTSYA

SEQ ID NO: 1700 - protein, 7 aa, synthetic construct
  REGION 1..7: note = source = /note="Description of Artificial Sequence: Synthetic peptide"
IWPGGGT

SEQ ID NO: 1701 - protein, 14 aa, synthetic construct
  REGION 1..14: note = source = /note="Description of Artificial Sequence: Synthetic peptide"
VRSYDGYLDWYFDV

SEQ ID NO: 1702 - protein, 107 aa, synthetic construct
  REGION 1..107: note = source = /note="Description of Artificial Sequence: Synthetic polypeptide"
NIVMTQSPKSMSMSVGERVTLSCKASENVGTYVSWYQQKPDQSPKLLIYGASNRYTGVPDRFTGSGSATDFTLIISSVQAEDLSDYHCGQSYSYPYTFGGGTKLEII

SEQ ID NO: 1703 - protein, 6 aa, synthetic construct
  REGION 1..6: note = source = /note="Description of Artificial Sequence: Synthetic peptide"
ENVGTY

SEQ ID NO: 1704 - skipped

SEQ ID NO: 1705 - protein, 9 aa, synthetic construct
  REGION 1..9: note = source = /note="Description of Artificial Sequence: Synthetic peptide"
GQSYSYPYT

SEQ ID NO: 1706 - protein, 123 aa, synthetic construct
  REGION 1..123: note = source = /note="Description of Artificial Sequence: Synthetic polypeptide"
QIQLVQSGPDLKKPGETVKISCKASGYTFTTYGMSWVKQAPGRGLKWMGWINTYSGVSTFPDDFKGRFAFSLETSASTAYLQINNLKNEDSATYFCARLGMGSTTGAGYFDVWGTGTTVTVSS

SEQ ID NO: 1707 - protein, 8 aa, synthetic construct
  REGION 1..8: note = source = /note="Description of Artificial Sequence: Synthetic peptide"
GYTFTTYG

SEQ ID NO: 1708 - protein, 8 aa, synthetic construct
  REGION 1..8: note = source = /note="Description of Artificial Sequence: Synthetic peptide"
INTYSGVS

SEQ ID NO: 1709 - protein, 16 aa, synthetic construct
  REGION 1..16: note = source = /note="Description of Artificial Sequence: Synthetic peptide"
ARLGMGSTTGAGYFDV

SEQ ID NO: 1710 - protein, 108 aa, synthetic construct
  REGION 1..108: note = source = /note="Description of Artificial Sequence: Synthetic polypeptide"
DIVLTQSPAIMSASPGEKVTMTCSASSSVSSWYLHWYQQKSGASPKLWIYGTSNLASGVPARFSGSGSGTSYSLTISSVEAEDAATYYCQQYRSDPYTFGSGTKLEIK

SEQ ID NO: 1711 - protein, 7 aa, synthetic construct
  REGION 1..7: note = source = /note="Description of Artificial Sequence: Synthetic peptide"
SSVSSWY

SEQ ID NO: 1712 - skipped

SEQ ID NO: 1713 - protein, 9 aa, synthetic construct
  REGION 1..9: note = source = /note="Description of Artificial Sequence: Synthetic peptide"
QQYRSDPYT

SEQ ID NO: 1714 - protein, 123 aa, synthetic construct
  REGION 1..123: note = source = /note="Description of Artificial Sequence: Synthetic polypeptide"
QIQLVQSGPELKKPGETVKISCKASGYTFTTYGMSWVKQAPGKGLKWMGWINTYSGVSTYADDFEGRFAFSLETSVSTAYLQINNLKNEDTATYFCARLGRGSTTGAGYLDVWGTGTTVTVSS

SEQ ID NO: 1715 - protein, 8 aa, synthetic construct
  REGION 1..8: note = source = /note="Description of Artificial Sequence: Synthetic peptide"
GYTFTTYG

SEQ ID NO: 1716 - protein, 8 aa, synthetic construct
  REGION 1..8: note = source = /note="Description of Artificial Sequence: Synthetic peptide"
INTYSGVS

SEQ ID NO: 1717 - protein, 16 aa, synthetic construct
  REGION 1..16: note = source = /note="Description of Artificial Sequence: Synthetic peptide"
ARLGRGSTTGAGYLDV

SEQ ID NO: 1718 - protein, 108 aa, synthetic construct
  REGION 1..108: note = source = /note="Description of Artificial Sequence: Synthetic polypeptide"
DIVLTQSPAIMSASPGEKVSMTCSASSSVSSWYLHWYQQKSGASPKLWIYGTSNLASGVPARFSGSGSGTSYSLTISSVEAEDAATYYCQQYHSDPYTFGSGTKLEIK

SEQ ID NO: 1719 - protein, 7 aa, synthetic construct
  REGION 1..7: note = source = /note="Description of Artificial Sequence: Synthetic peptide"
SSVSSWY

SEQ ID NO: 1720 - skipped

SEQ ID NO: 1721 - protein, 9 aa, synthetic construct
  REGION 1..9: note = source = /note="Description of Artificial Sequence: Synthetic peptide"
QQYHSDPYT

SEQ ID NO: 1722 - protein, 123 aa, synthetic construct; identical to SEQ ID NO: 1706
  REGION 1..123: note = source = /note="Description of Artificial Sequence: Synthetic polypeptide"

SEQ ID NO: 1723 - protein, 8 aa, synthetic construct
  REGION 1..8: note = source = /note="Description of Artificial Sequence: Synthetic peptide"
GYTFTTYG

SEQ ID NO: 1724 - protein, 8 aa, synthetic construct
  REGION 1..8: note = source = /note="Description of Artificial Sequence: Synthetic peptide"
INTYSGVS

SEQ ID NO: 1725 - protein, 16 aa, synthetic construct
  REGION 1..16: note = source = /note="Description of Artificial Sequence: Synthetic peptide"
ARLGMGSTTGAGYFDV

SEQ ID NO: 1726 - protein, 106 aa, synthetic construct
  REGION 1..106: note = source = /note="Description of Artificial Sequence: Synthetic polypeptide"
ENVLTQSPAIMSASLGEKVTLSCRASSSVNYMYWYQQKSDASPKLWIYYTSNLAPGVPARFSGSGSGNSYSLTISSVEGEDAATYYCQQFTSSPWTFGGGTKLEIK

SEQ ID NO: 1727 - protein, 5 aa, synthetic construct
  REGION 1..5: note = source = /note="Description of Artificial Sequence: Synthetic peptide"
SSVNY

SEQ ID NO: 1728 - skipped

SEQ ID NO: 1729 - protein, 9 aa, synthetic construct
  REGION 1..9: note = source = /note="Description of Artificial Sequence: Synthetic peptide"
QQFTSSPWT

SEQ ID NO: 1730 - protein, 114 aa, synthetic construct
  REGION 1..114: note = source = /note="Description of Artificial Sequence: Synthetic polypeptide"
EVQLQQSGPELVKPGASVKISCKASGYTFTDYSMNWVKQSHGKSLEWIGDITPNNGSPNYNQKFKDKATLTVDKSSSTVYMELRSLTSEDSAVYYCASLFFDYWGHGTTLTVSS

SEQ ID NO: 1731 - protein, 8 aa, synthetic construct
  REGION 1..8: note = source = /note="Description of Artificial Sequence: Synthetic peptide"
GYTFTDYS

SEQ ID NO: 1732 - protein, 8 aa, synthetic construct
  REGION 1..8: note = source = /note="Description of Artificial Sequence: Synthetic peptide"
ITPNNGSP

SEQ ID NO: 1733 - protein, 7 aa, synthetic construct
  REGION 1..7: note = source = /note="Description of Artificial Sequence: Synthetic peptide"
ASLFFDY

SEQ ID NO: 1734 - protein, 113 aa, synthetic construct
  REGION 1..113: note = source = /note="Description of Artificial Sequence: Synthetic polypeptide"
DIVMTQSPSSLSVSAGEKVTMSCKSSQSLLNSGNQKNYLAWYQQKPGQPPKLLIYGASTRDSGVPDRFTGSGSGTDFTLTITSVQAEDLAVYYCQNDHTYPYTFGGGTKLEIK

SEQ ID NO: 1735 - protein, 12 aa, synthetic construct
  REGION 1..12: note = source = /note="Description of Artificial Sequence: Synthetic peptide"
QSLLNSGNQKNY

SEQ ID NO: 1736 - skipped

SEQ ID NO: 1737 - protein, 9 aa, synthetic construct
  REGION 1..9: note = source = /note="Description of Artificial Sequence: Synthetic peptide"
QNDHTYPYT

SEQ ID NO: 1738 - protein, 120 aa, synthetic construct
  REGION 1..120: note = source = /note="Description of Artificial Sequence: Synthetic polypeptide"
QVQLQQPGTELVKPGASVKLSCKASGFTFTTHWMHWVRQRPGQGLEWIGNIYPSNGGSNYNEKFKTKATLTVDRSSSTAYMHLSSLTSEDSAVYYCARRVNWDGYYFDYWGQGTTLTVSS

SEQ ID NO: 1739 - protein, 8 aa, synthetic construct
  REGION 1..8: note = source = /note="Description of Artificial Sequence: Synthetic peptide"
GFTFTTHW

SEQ ID NO: 1740 - protein, 8 aa, synthetic construct
  REGION 1..8: note = source = /note="Description of Artificial Sequence: Synthetic peptide"
IYPSNGGS

SEQ ID NO: 1741 - protein, 13 aa, synthetic construct
  REGION 1..13: note = source = /note="Description of Artificial Sequence: Synthetic peptide"
ARRVNWDGYYFDY

SEQ ID NO: 1742 - protein, 107 aa, synthetic construct
  REGION 1..107: note = source = /note="Description of Artificial Sequence: Synthetic polypeptide"
DIVMTQSQKFMSTSVGDRVSVTCKASQNVGTNVAWYQQKPGQSPKLLIYSASYRYSGVPDRFTGSGSGTDFTLTISNVQSEDLADYFCQQYNSYPLTFGGGTKLEIK

SEQ ID NO: 1743 - protein, 6 aa, synthetic construct
  REGION 1..6: note = source = /note="Description of Artificial Sequence: Synthetic peptide"
QNVGTN

SEQ ID NO: 1744 - skipped

SEQ ID NO: 1745 - protein, 9 aa, synthetic construct
  REGION 1..9: note = source = /note="Description of Artificial Sequence: Synthetic peptide"
QQYNSYPLT

SEQ ID NO: 1746 - protein, 118 aa, synthetic construct
  REGION 1..118: note = source = /note="Description of Artificial Sequence: Synthetic polypeptide"
QVQLQESGTELVKPGASVKLSCKASGYTFTSYWIHWVKQRPGQGLEWIGNINPSNGGTNYNEKFKSKAALTVDKSSSTAYMQLSSLTSEDSAVYYCARRGLPYFFDYWGQGTTLTVSS

SEQ ID NO: 1747 - protein, 8 aa, synthetic construct
  REGION 1..8: note = source = /note="Description of Artificial Sequence: Synthetic peptide"
GYTFTSYW

SEQ ID NO: 1748 - protein, 8 aa, synthetic construct
  REGION 1..8: note = source = /note="Description of Artificial Sequence: Synthetic peptide"
INPSNGGT

SEQ ID NO: 1749 - protein, 11 aa, synthetic construct
  REGION 1..11: note = source = /note="Description of Artificial Sequence: Synthetic peptide"
ARRGLPYFFDY

SEQ ID NO: 1750 - protein, 107 aa, synthetic construct
  REGION 1..107: note = source = /note="Description of Artificial Sequence: Synthetic polypeptide"
DIVMTQSQKFMSTSVGDRVSVTCKGSQNVGYNVAWYQQKPGQSPKALVYSASDRHSGVPDRFAGSGSGTDFTLTISNVQSEDLAEYFCQQYNSYPLTFGAGTKLELK

SEQ ID NO: 1751 - protein, 6 aa, synthetic construct
  REGION 1..6: note = source = /note="Description of Artificial Sequence: Synthetic peptide"
QNVGYN

SEQ ID NO: 1752 - skipped

SEQ ID NO: 1753 - protein, 9 aa, synthetic construct
  REGION 1..9: note = source = /note="Description of Artificial Sequence: Synthetic peptide"
QQYNSYPLT

SEQ ID NO: 1754 - protein, 98 aa, synthetic construct
  REGION 1..98: note = source = /note="Description of Artificial Sequence: Synthetic polypeptide"
QVQLVQSGAEVKKPGASVKVSCKASGYTFTSYYMHWVRQAPGQGLEWMGIINPSGGSTSYAQKFQGRVTMTRDTSTSTVYMELSSLRSEDTAVYYCAR

SEQ ID NO: 1755 - protein, 15 aa, synthetic construct
  REGION 1..15: note = source = /note="Description of Artificial Sequence: Synthetic peptide"
YFDYWGQGTLVTVSS

SEQ ID NO: 1756 - protein, 120 aa, synthetic construct; identical to SEQ ID NO: 1578
  VARIANT 33: note = /replace="Gln" or "Ser" or "Ala"
  VARIANT 105: note = /replace="Gln" or "Ser" or "Ala"
  REGION 1..120: note = MISC_FEATURE - /note="Variant residues given in the sequence have no preference with respect to those in the annotations for variant positions"
  REGION 1..120: note = source = /note="Description of Artificial Sequence: Synthetic polypeptide"

SEQ ID NO: 1757 - protein, 98 aa, synthetic construct; identical to SEQ ID NO: 1754
  VARIANT 33: note = /replace="Gln" or "Ser" or "Ala"
  REGION 1..98: note = MISC_FEATURE - /note="Variant residues given in the sequence have no preference with respect to those in the annotations for variant positions"
  REGION 1..98: note = source = /note="Description of Artificial Sequence: Synthetic polypeptide"

SEQ ID NO: 1758 - protein, 120 aa, synthetic construct; identical to SEQ ID NO: 1019
  VARIANT 33: note = /replace="Gln" or "Ser" or "Ala"
  VARIANT 105: note = /replace="Gln" or "Ser" or "Ala"
  REGION 1..120: note = MISC_FEATURE - /note="Variant residues given in the sequence have no preference with respect to those in the annotations for variant positions"
  REGION 1..120: note = source = /note="Description of Artificial Sequence: Synthetic polypeptide"

SEQ ID NO: 1759 - protein, 120 aa, synthetic construct
  VARIANT 33: note = /replace="Gln" or "Ser" or "Ala"
  VARIANT 105: note = /replace="Gln" or "Ser" or "Ala"
  REGION 1..120: note = MISC_FEATURE - /note="Variant residues given in the sequence have no preference with respect to those in the annotations for variant positions"
  REGION 1..120: note = source = /note="Description of Artificial Sequence: Synthetic polypeptide"
QVQLVQSGAEVKKPGASVKVSCKASGYTFTDYNINWVRQAPGQGLEWIGYIYPYIGGSGYAQKFQGRVTMTADTSTSTVYMELSSLRSEDTAVYYCAREDKTARNAMDYWGQGTLVTVSS

SEQ ID NO: 1760 - protein, 120 aa, synthetic construct
  VARIANT 33: note = /replace="Gln" or "Ser" or "Ala"
  VARIANT 105: note = /replace="Gln" or "Ser" or "Ala"
  REGION 1..120: note = MISC_FEATURE - /note="Variant residues given in the sequence have no preference with respect to those in the annotations for variant positions"
  REGION 1..120: note = source = /note="Description of Artificial Sequence: Synthetic polypeptide"
QVQLVQSGAEVKKPGASVKISCKASGYTFTDYNINWVRQAPGQGLEWIGYIYPYIGGSGYAQKFQGRATLTADTSTSTAYMELSSLRSEDTAVYYCAREDKTARNAMDYWGQGTLVTVSS

SEQ ID NO: 1761 - protein, 120 aa, synthetic construct
  VARIANT 33: note = /replace="Gln" or "Ser" or "Ala"
  VARIANT 105: note = /replace="Gln" or "Ser" or "Ala"
  REGION 1..120: note = MISC_FEATURE - /note="Variant residues given in the sequence have no preference with respect to those in the annotations for variant positions"
  REGION 1..120: note = source = /note="Description of Artificial Sequence: Synthetic polypeptide"
QVQLVQSGAEVKKPGASVKISCKASGYTFTDYNINWVRQAPGQGLEWIGYIYPYIGGSGYAQKFQGRATLTADNSTSTAYMELSSLRSEDTAVYYCAREDKTARNAMDYWGQGTLVTVSS

SEQ ID NO: 1762 - protein, 96 aa, synthetic construct
  REGION 1..96: note = source = /note="Description of Artificial Sequence: Synthetic polypeptide"
DIQMTQSPSSLSASVGDRVTITCRASQSISSYLNWYQQKPGKAPKLLIYAASSLQSGVPSRFSGSGSGTDFTLTISSLQPEDFATYYCQQSYSTPP

SEQ ID NO: 1763 - protein, 12 aa, synthetic construct
  REGION 1..12: note = source = /note="Description of Artificial Sequence: Synthetic peptide"
YTFGQGTKLEIK

SEQ ID NO: 1764 - protein, 107 aa, synthetic construct; identical to SEQ ID NO: 1582
  VARIANT 28: note = /replace="Gln" or "Ser" or "Ala" or "Asp"
  VARIANT 32: note = /replace="Gln" or "Ser" or "Ala" or "Asp"
  VARIANT 53: note = /replace="Gln" or "Ser" or "Ala" or "Asp"
  VARIANT 92: note = /replace="Tyr" or "Phe" or "His"
  REGION 1..107: note = MISC_FEATURE - /note="Variant residues given in the sequence have no preference with respect to those in the annotations for variant positions"
  REGION 1..107: note = source = /note="Description of Artificial Sequence: Synthetic polypeptide"

SEQ ID NO: 1765 - protein, 96 aa, synthetic construct
  VARIANT 28: note = /replace="Ser" or "Ala" or "Asp"
  VARIANT 32: note = /replace="Gln" or "Ser" or "Ala" or "Asp"
  VARIANT 53: note = /replace="Ser" or "Ala" or "Asp"
  VARIANT 92: note = /replace="Phe" or "His"
  REGION 1..96: note = MISC_FEATURE - /note="Variant residues given in the sequence have no preference with respect to those in the annotations for variant positions"
  REGION 1..96: note = source = /note="Description of Artificial Sequence: Synthetic polypeptide"
DIQMTQSPSSLSASVGDRVTITCRASQQISSYLNWYQQKPGKAPKLLIYAASQLQSGVPSRFSGSGSGTDFTLTISSLQPEDFATYYCQQSYSTPP

SEQ ID NO: 1766 - protein, 107 aa, synthetic construct; identical to SEQ ID NO: 1024
  VARIANT 28: note = /replace="Gln" or "Ser" or "Ala" or "Asp"
  VARIANT 32: note = /replace="Gln" or "Ser" or "Ala" or "Asp"
  VARIANT 53: note = /replace="Gln" or "Ser" or "Ala" or "Asp"
  VARIANT 92: note = /replace="Tyr" or "Phe" or "His"
  REGION 1..107: note = MISC_FEATURE - /note="Variant residues given in the sequence have no preference with respect to those in the annotations for variant positions"
  REGION 1..107: note = source = /note="Description of Artificial Sequence: Synthetic polypeptide"

SEQ ID NO: 1767 - protein, 107 aa, synthetic construct
  VARIANT 28: note = /replace="Gln" or "Ser" or "Ala" or "Asp"
  VARIANT 32: note = /replace="Gln" or "Ser" or "Ala" or "Asp"
  VARIANT 53: note = /replace="Gln" or "Ser" or "Ala" or "Asp"
  VARIANT 92: note = /replace="Tyr" or "Phe" or "His"
  REGION 1..107: note = MISC_FEATURE - /note="Variant residues given in the sequence have no preference with respect to those in the annotations for variant positions"
  REGION 1..107: note = source = /note="Description of Artificial Sequence: Synthetic polypeptide"
DIQMTQSPSSLSASVGDRVTITCRVSENIYSNLAWYQQKPGKAPKLLIYEATNLAEGVPSRFSGSGSGTDYTLTISSLQPEDFATYYCQHFWGTPYTFGQGTKLEIK

SEQ ID NO: 1768 - protein, 107 aa, synthetic construct
  VARIANT 28: note = /replace="Gln" or "Ser" or "Ala" or "Asp"
  VARIANT 32: note = /replace="Gln" or "Ser" or "Ala" or "Asp"
  VARIANT 53: note = /replace="Gln" or "Ser" or "Ala" or "Asp"
  VARIANT 92: note = /replace="Tyr" or "Phe" or "His"
  REGION 1..107: note = MISC_FEATURE - /note="Variant residues given in the sequence have no preference with respect to those in the annotations for variant positions"
  REGION 1..107: note = source = /note="Description of Artificial Sequence: Synthetic polypeptide"
DIQMTQSPSSLSASVGDRVTITCRVSENIYSNLAWYQQKPGKAPKLLVYEATNLAEGVPSRFSGSGSGTDYTLTISSLQPEDFGTYYCQHFWGTPYTFGQGTKLEIK

SEQ ID NO: 1769 - protein, 98 aa, synthetic construct; identical to SEQ ID NO: 1754
  REGION 1..98: note = source = /note="Description of Artificial Sequence: Synthetic polypeptide"

SEQ ID NO: 1770 - protein, 15 aa, synthetic construct
  REGION 1..15: note = source = /note="Description of Artificial Sequence: Synthetic peptide"
YFDYWGQGTLVTVSS

SEQ ID NO: 1771 - protein, 119 aa, synthetic construct; identical to SEQ ID NO: 1674
  VARIANT 31: note = /replace="Gln" or "Ser" or "Ala"
  VARIANT 52: note = /replace="Gln" or "Ser" or "Ala"
  VARIANT 105: note = /replace="Tyr" or "Phe" or "His"
  REGION 1..119: note = MISC_FEATURE - /note="Variant residues given in the sequence have no preference with respect to those in the annotations for variant positions"
  REGION 1..119: note = source = /note="Description of Artificial Sequence: Synthetic polypeptide"

SEQ ID NO: 1772 - protein, 98 aa, synthetic construct
  VARIANT 31: note = /replace="Ser" or "Ala"
  VARIANT 52: note = /replace="Gln" or "Ser" or "Ala"
  REGION 1..98: note = MISC_FEATURE - /note="Variant residues given in the sequence have no preference with respect to those in the annotations for variant positions"
  REGION 1..98: note = source = /note="Description of Artificial Sequence: Synthetic polypeptide"
QVQLVQSGAEVKKPGASVKVSCKASGYTFTQYYMHWVRQAPGQGLEWMGIINPSGGSTSYAQKFQGRVTMTRDTSTSTVYMELSSLRSEDTAVYYCAR

SEQ ID NO: 1773 - protein, 119 aa, synthetic construct
  VARIANT 31: note = /replace="Gln" or "Ser" or "Ala"
  VARIANT 52: note = /replace="Gln" or "Ser" or "Ala"
  VARIANT 105: note = /replace="Tyr" or "Phe" or "His"
  REGION 1..119: note = MISC_FEATURE - /note="Variant residues given in the sequence have no preference with respect to those in the annotations for variant positions"
  REGION 1..119: note = source = /note="Description of Artificial Sequence: Synthetic polypeptide"
QVQLVQSGAEVKKPGASVKVSCKASGYAFTNYLIEWVRQAPGQGLEWMGVINPGSGGIYYAQKFQGRVTMTRDTSTSTVYMELSSLRSEDTAVYYCARSETHDTWFAYWGQGTLVTVSS

SEQ ID NO: 1774 - protein, 119 aa, synthetic construct; identical to SEQ ID NO: 1029
  VARIANT 31: note = /replace="Gln" or "Ser" or "Ala"
  VARIANT 52: note = /replace="Gln" or "Ser" or "Ala"
  VARIANT 105: note = /replace="Tyr" or "Phe" or "His"
  REGION 1..119: note = MISC_FEATURE - /note="Variant residues given in the sequence have no preference with respect to those in the annotations for variant positions"
  REGION 1..119: note = source = /note="Description of Artificial Sequence: Synthetic polypeptide"

SEQ ID NO: 1775 - protein, 119 aa, synthetic construct
  VARIANT 31: note = /replace="Gln" or "Ser" or "Ala"
  VARIANT 52: note = /replace="Gln" or "Ser" or "Ala"
  VARIANT 105: note = /replace="Tyr" or "Phe" or "His"
  REGION 1..119: note = MISC_FEATURE - /note="Variant residues given in the sequence have no preference with respect to those in the annotations for variant positions"
  REGION 1..119: note = source = /note="Description of Artificial Sequence: Synthetic polypeptide"
QVQLVQSGAEVKKPGASVKVSCKTSGYAFTNYLIEWVRQAPGQGLEWIGVINPGSGGIYYAQKFQGRVTLTADTSTSTAYMELSSLRSEDTAVYYCARSETHDTWFAYWGQGTLVTVSS

SEQ ID NO: 1776 - protein, 119 aa, synthetic construct
  VARIANT 31: note = /replace="Gln" or "Ser" or "Ala"
  VARIANT 52: note = /replace="Gln" or "Ser" or "Ala"
  VARIANT 105: note = /replace="Tyr" or "Phe" or "His"
  REGION 1..119: note = MISC_FEATURE - /note="Variant residues given in the sequence have no preference with respect to those in the annotations for variant positions"
  REGION 1..119: note = source = /note="Description of Artificial Sequence: Synthetic polypeptide"
QVQLVQSGAEVKKPGASVKVSCKTSGYAFTNYLIEWVRQAPGQGLEWIGVINPGSGGIYYAQKFQGRVTLTADKSTSTAYMELSSLRSEDTAVYYCARSETHDTWFAYWGQGTLVTVSS

SEQ ID NO: 1777 - protein, 96 aa, synthetic construct; identical to SEQ ID NO: 1762
  REGION 1..96: note = source = /note="Description of Artificial Sequence: Synthetic polypeptide"

SEQ ID NO: 1778 - protein, 12 aa, synthetic construct
  REGION 1..12: note = source = /note="Description of Artificial Sequence: Synthetic peptide"
YTFGQGTKLEIK

SEQ ID NO: 1779 - protein, 96 aa, synthetic construct
  REGION 1..96: note = source = /note="Description of Artificial Sequence: Synthetic polypeptide"
DIQMTQSPSSLSASVGDRVTITCRASQGIRNDLGWYQQKPGKAPKRLIYAASSLQSGVPSRFSGSGSGTEFTLTISNLQPEDFATYYCLQHNSYPP

SEQ ID NO: 1780 - protein, 107 aa, synthetic construct
  VARIANT 92: note = /replace="Tyr" or "Phe" or "His"
  VARIANT 93: note = /replace="Gln" or "Ser" or "Ala" or "Asp"
  REGION 1..107: note = MISC_FEATURE - /note="Variant residues given in the sequence have no preference with respect to those in the annotations for variant positions"
  REGION 1..107: note = source = /note="Description of Artificial Sequence: Synthetic polypeptide"
DIVMTQSQKFISTSVGDRVSITCKASQSVRIAVAWFQQKPGQSPKALIYLASTRHTGVPDRFTGSGSGTDFTLTISNVQSEDLADYFCLQHWNYPYTFGGGTKLEIK

SEQ ID NO: 1781 - protein, 96 aa, synthetic construct
  VARIANT 92: note = /replace="Phe" or "His"
  VARIANT 93: note = /replace="Ser" or "Ala" or "Asp"
  REGION 1..96: note = MISC_FEATURE - /note="Variant residues given in the sequence have no preference with respect to those in the annotations for variant positions"
  REGION 1..96: note = source = /note="Description of Artificial Sequence: Synthetic polypeptide"
DIQMTQSPSSLSASVGDRVTITCRASQSISSYLNWYQQKPGKAPKLLIYAASSLQSGVPSRFSGSGSGTDFTLTISSLQPEDFATYYCQQSYQTPP

SEQ ID NO: 1782 - protein, 107 aa, synthetic construct
  VARIANT 92: note = /replace="Tyr" or "Phe" or "His"
  VARIANT 93: note = /replace="Gln" or "Ser" or "Ala" or "Asp"
  REGION 1..107: note = MISC_FEATURE - /note="Variant residues given in the sequence have no preference with respect to those in the annotations for variant positions"
  REGION 1..107: note = source = /note="Description of Artificial Sequence: Synthetic polypeptide"
DIQMTQSPSSLSASVGDRVTITCKASQSVRIAVAWYQQKPGKAPKLLIYLASTRHTGVPSRFSGSGSGTDFTLTISSLQPEDFATYYCLQHWNYPYTFGQGTKLEIK

SEQ ID NO: 1783 - protein, 107 aa, synthetic construct; identical to SEQ ID NO: 1034
  VARIANT 92: note = /replace="Tyr" or "Phe" or "His"
  VARIANT 93: note = /replace="Gln" or "Ser" or "Ala" or "Asp"
  REGION 1..107: note = MISC_FEATURE - /note="Variant residues given in the sequence have no preference with respect to those in the annotations for variant positions"
  REGION 1..107: note = source = /note="Description of Artificial Sequence: Synthetic polypeptide"

SEQ ID NO: 1784 - protein, 98 aa, synthetic construct; identical to SEQ ID NO: 1754
  REGION 1..98: note = source = /note="Description of Artificial Sequence: Synthetic polypeptide"

SEQ ID NO: 1785 - protein, 15 aa, synthetic construct
  REGION 1..15: note = source = /note="Description of Artificial Sequence: Synthetic peptide"
YFDYWGQGTLVTVSS

SEQ ID NO: 1786 - protein, 120 aa, synthetic construct; identical to SEQ ID NO: 1682
  VARIANT 31: note = /replace="Gln" or "Ser" or "Ala"
  VARIANT 33: note = /replace="Tyr" or "Phe" or "His"
  VARIANT 59: note = /replace="Gln" or "Ser" or "Ala"
  REGION 1..120: note = MISC_FEATURE - /note="Variant residues given in the sequence have no preference with respect to those in the annotations for variant positions"
  REGION 1..120: note = source = /note="Description of Artificial Sequence: Synthetic polypeptide"

SEQ ID NO: 1787 - protein, 98 aa, synthetic construct
  VARIANT 31: note = /replace="Ser" or "Ala"
  VARIANT 33: note = /replace="Phe" or "His"
  VARIANT 59: note = /replace="Ser" or "Ala"
  REGION 1..98: note = MISC_FEATURE - /note="Variant residues given in the sequence have no preference with respect to those in the annotations for variant positions"
  REGION 1..98: note = source = /note="Description of Artificial Sequence: Synthetic polypeptide"
QVQLVQSGAEVKKPGASVKVSCKASGYTFTQYYMHWVRQAPGQGLEWMGIINPSGGSTQYAQKFQGRVTMTRDTSTSTVYMELSSLRSEDTAVYYCAR

SEQ ID NO: 1788 - protein, 120 aa, synthetic construct
  VARIANT 31: note = /replace="Gln" or "Ser" or "Ala"
  VARIANT 33: note = /replace="Tyr" or "Phe" or "His"
  VARIANT 59: note = /replace="Gln" or "Ser" or "Ala"
  REGION 1..120: note = MISC_FEATURE - /note="Variant residues given in the sequence have no preference with respect to those in the annotations for variant positions"
  REGION 1..120: note = source = /note="Description of Artificial Sequence: Synthetic polypeptide"
QVQLVQSGAEVKKPGASVKVSCKASGYTFTNYWIGWVRQAPGQGLEWMGDIYPGGGYTNYAQKFQGRVTMTRDTSTSTVYMELSSLRSEDTAVYYCARPYYGSSYGFAFWGQGTLVTVSS

SEQ ID NO: 1789 - protein, 120 aa, synthetic construct
  VARIANT 31: note = /replace="Gln" or "Ser" or "Ala"
  VARIANT 33: note = /replace="Tyr" or "Phe" or "His"
  VARIANT 59: note = /replace="Gln" or "Ser" or "Ala"
  REGION 1..120: note = MISC_FEATURE - /note="Variant residues given in the sequence have no preference with respect to those in the annotations for variant positions"
  REGION 1..120: note = source = /note="Description of Artificial Sequence: Synthetic polypeptide"
QVQLVQSGAEVKKPGASVKVSCKASGYTFTNYWIGWVRQAPGQGLEWIGDIYPGGGYTNYAQKFQGRVTMTADTSTSTVYMELSSLRSEDTAVYYCASPYYGSSYGFAFWGQGTLVTVSS

SEQ ID NO: 1790 - protein, 120 aa, synthetic construct
  VARIANT 31: note = /replace="Gln" or "Ser" or "Ala"
  VARIANT 33: note = /replace="Tyr" or "Phe" or "His"
  VARIANT 59: note = /replace="Gln" or "Ser" or "Ala"
  REGION 1..120: note = MISC_FEATURE - /note="Variant residues given in the sequence have no preference with respect to those in the annotations for variant positions"
  REGION 1..120: note = source = /note="Description of Artificial Sequence: Synthetic polypeptide"
QVQLVQSGAEVKKPGASVKMSCKASGYTFTNYWIGWVRQAPGQGLEWIGDIYPGGGYTNYAQKFQGRATLTADTSTSTAYMELSSLRSEDTAVYYCASPYYGSSYGFAFWGQGTLVTVSS

SEQ ID NO: 1791 - protein, 98 aa, synthetic construct; identical to SEQ ID NO: 1754
  REGION 1..98: note = source = /note="Description of Artificial Sequence: Synthetic polypeptide"

SEQ ID NO: 1792 - protein, 15 aa, synthetic construct
  REGION 1..15: note = source = /note="Description of Artificial Sequence: Synthetic peptide"
YFDYWGQGTLVTVSS

SEQ ID NO: 1793 - protein, 118 aa, synthetic construct; identical to SEQ ID NO: 1610
  VARIANT 57: note = /replace="Gln" or "Ser" or "Ala"
  VARIANT 59: note = /replace="Gln" or "Ser" or "Ala"
  VARIANT 104: note = /replace="Leu" or "Phe" or "Ala"
  REGION 1..118: note = MISC_FEATURE - /note="Variant residues given in the sequence have no preference with respect to those in the annotations for variant positions"
  REGION 1..118: note = source = /note="Description of Artificial Sequence: Synthetic polypeptide"

SEQ ID NO: 1794 - protein, 98 aa, synthetic construct; identical to SEQ ID NO: 1754
  VARIANT 57: note = /replace="Gln" or "Ala"
  VARIANT 59: note = /replace="Gln" or "Ala"
  REGION 1..98: note = MISC_FEATURE - /note="Variant residues given in the sequence have no preference with respect to those in the annotations for variant positions"
  REGION 1..98: note = source = /note="Description of Artificial Sequence: Synthetic polypeptide"

SEQ ID NO: 1795 - protein, 118 aa, synthetic construct
  VARIANT 57: note = /replace="Gln" or "Ser" or "Ala"
  VARIANT 59: note = /replace="Gln" or "Ser" or "Ala"
  VARIANT 104: note = /replace="Leu" or "Phe" or "Ala"
  REGION 1..118: note = MISC_FEATURE - /note="Variant residues given in the sequence have no preference with respect to those in the annotations for variant positions"
  REGION 1..118: note = source = /note="Description of Artificial Sequence: Synthetic polypeptide"
QVQLVQSGAEVKKPGASVKVSCKASGYKFPDYVMHWVRQAPGQGLEWMGIISIYSGNTNYAQKFQGRVTMTRDTSTSTVYMELSSLRSEDTAVYYCAREGDLPMFAYWGQGTLVTVSS

SEQ ID NO: 1796 - protein, 118 aa, synthetic construct
  VARIANT 57: note = /replace="Gln" or "Ser" or "Ala"
  VARIANT 59: note = /replace="Gln" or "Ser" or "Ala"
  VARIANT 104: note = /replace="Leu" or "Phe" or "Ala"
  REGION 1..118: note = MISC_FEATURE - /note="Variant residues given in the sequence have no preference with respect to those in the annotations for variant positions"
  REGION 1..118: note = source = /note="Description of Artificial Sequence: Synthetic polypeptide"
QVQLVQSGAEVKKPGASVKVSCKASGYKFPDYVMHWVRQAPGQGLEWIGIISIYSGNTNYAQKFQGRVTMTVDTSTSTVYMELSSLRSEDTAVYYCAREGDLPMFAYWGQGTLVTVSS

SEQ ID NO: 1797 - protein, 118 aa, synthetic construct
  VARIANT 57: note = /replace="Gln" or "Ser" or "Ala"
  VARIANT 59: note = /replace="Gln" or "Ser" or "Ala"
  VARIANT 104: note = /replace="Leu" or "Phe" or "Ala"
  REGION 1..118: note = MISC_FEATURE - /note="Variant residues given in the sequence have no preference with respect to those in the annotations for variant positions"
  REGION 1..118: note = source = /note="Description of Artificial Sequence: Synthetic polypeptide"
QVQLVQSGAEVKKPGASVKISCKGSGYKFPDYVMHWVRQAPGQGLEWIGIISIYSGNTNYAQKFQGRATMTVDTSTSTAYMELSSLRSEDTAVYYCAREGDLPMFAYWGQGTLVTVSS

SEQ ID NO: 1798 - protein, 118 aa, synthetic construct
  VARIANT 57: note = /replace="Gln" or "Ser" or "Ala"
  VARIANT 59: note = /replace="Gln" or "Ser" or "Ala"
  VARIANT 104: note = /replace="Leu" or "Phe" or "Ala"
  REGION 1..118: note = MISC_FEATURE - /note="Variant residues given in the sequence have no preference with respect to those in the annotations for variant positions"
  REGION 1..118: note = source = /note="Description of Artificial Sequence: Synthetic polypeptide"
QVQLVQSGAEVKKPGASVKISCKGSGYKFPDYVMHWVRQAPGQGLEWIGIISIYSGNTNYAQKFQGRATMTVDKSTSTAYMELSSLRSEDTAVYYCAREGDLPMFAYWGQGTLVTVSS

SEQ ID NO: 1799 - protein, 96 aa, synthetic construct
  REGION 1..96: note = source = /note="Description of Artificial Sequence: Synthetic polypeptide"
EIVLTQSPATLSLSPGERATLSCRASQSVSSYLAWYQQKPGQAPRLLIYDASNRATGIPARFSGSGSGTDFTLTISSLEPEDFAVYYCQQRSNWPP

SEQ ID NO: 1800 - protein, 12 aa, synthetic construct
  REGION 1..12: note = source = /note="Description of Artificial Sequence: Synthetic peptide"
YTFGQGTKLEIK

SEQ ID NO: 1801 - protein, 106 aa, synthetic construct; identical to SEQ ID NO: 1614
  VARIANT 24: note = /replace="Gln" or "Ser" or "Ala" or "Asp"
  VARIANT 52: note = /replace="Gln" or "Ser" or "Ala" or "Asp"
  VARIANT 90: note = /replace="Tyr" or "Phe" or "His"
  REGION 1..106: note = MISC_FEATURE - /note="Variant residues given in the sequence have no preference with respect to those in the annotations for variant positions"
  REGION 1..106: note = source = /note="Description of Artificial Sequence: Synthetic polypeptide"

SEQ ID NO: 1802 - protein, 96 aa, synthetic construct; identical to SEQ ID NO: 1799
  VARIANT 24: note = /replace="Gln" or "Ser" or "Ala" or "Asp"
  VARIANT 53: note = /replace="Gln" or "Ser" or "Ala" or "Asp"
  VARIANT 91: note = /replace="Tyr" or "Phe" or "His"
  REGION 1..96: note = MISC_FEATURE - /note="Variant residues given in the sequence have no preference with respect to those in the annotations for variant positions"
  REGION 1..96: note = source = /note="Description of Artificial Sequence: Synthetic polypeptide"

SEQ ID NO: 1803 - protein, 106 aa, synthetic construct
  VARIANT 24: note = /replace="Gln" or "Ser" or "Ala" or "Asp"
  VARIANT 52: note = /replace="Gln" or "Ser" or "Ala" or "Asp"
  VARIANT 90: note = /replace="Tyr" or "Phe" or "His"
  REGION 1..106: note = MISC_FEATURE - /note="Variant residues given in the sequence have no preference with respect to those in the annotations for variant positions"
  REGION 1..106: note = source = /note="Description of Artificial Sequence: Synthetic polypeptide"
EIVLTQSPATLSLSPGERATLSCNASSSVSYMYWYQQKPGQAPRLLIYDTSNLASGIPARFSGSGSGTDFTLTISSLEPEDFAVYYCQQWSSYPLTFGQGTKLEIK

SEQ ID NO: 1804 - protein, 106 aa, synthetic construct
  VARIANT 24: note = /replace="Gln" or "Ser" or "Ala" or "Asp"
  VARIANT 52: note = /replace="Gln" or "Ser" or "Ala" or "Asp"
  VARIANT 90: note = /replace="Tyr" or "Phe" or "His"
  REGION 1..106: note = MISC_FEATURE - /note="Variant residues given in the sequence have no preference with respect to those in the annotations for variant positions"
  REGION 1..106: note = source = /note="Description of Artificial Sequence: Synthetic polypeptide"
EIVLTQSPATLSLSPGERATLSCNASSSVSYMYWYQQKPGQAPRLLIYDTSNLASGIPARFSGSGSGTDYTLTISSLEPEDFAVYYCQQWSSYPLTFGQGTKLEIK

SEQ ID NO: 1805 - protein, 106 aa, synthetic construct
  VARIANT 24: note = /replace="Gln" or "Ser" or "Ala" or "Asp"
  VARIANT 52: note = /replace="Gln" or "Ser" or "Ala" or "Asp"
  VARIANT 90: note = /replace="Tyr" or "Phe" or "His"
  REGION 1..106: note = MISC_FEATURE - /note="Variant residues given in the sequence have no preference with respect to those in the annotations for variant positions"
  REGION 1..106: note = source = /note="Description of Artificial Sequence: Synthetic polypeptide"
EIVLTQSPATLSLSPGERVTMSCNASSSVSYMYWYQQKPGQAPRLLIYDTSNLASGVPARFSGSGSGTDYTLTISSMEPEDFAVYYCQQWSSYPLTFGQGTKVEIK

SEQ ID NO: 1806 - protein, 98 aa, synthetic construct; identical to SEQ ID NO: 1754
  REGION 1..98: note = source = /note="Description of Artificial Sequence: Synthetic polypeptide"

SEQ ID NO: 1807 - protein, 15 aa, synthetic construct
  REGION 1..15: note = source = /note="Description of Artificial Sequence: Synthetic peptide"
YFDYWGQGTLVTVSS

SEQ ID NO: 1808 - protein, 119 aa, synthetic construct; identical to SEQ ID NO: 1642
  VARIANT 31: note = /replace="Gln" or "Ser" or "Ala"
  VARIANT 52: note = /replace="Gln" or "Ser" or "Ala"
  VARIANT 103: note = /replace="Gln" or "Ser" or "Ala"
  VARIANT 105: note = /replace="Tyr" or "Phe" or "His"
  REGION 1..119: note = MISC_FEATURE - /note="Variant residues given in the sequence have no preference with respect to those in the annotations for variant positions"
  REGION 1..119: note = source = /note="Description of Artificial Sequence: Synthetic polypeptide"

SEQ ID NO: 1809 - protein, 98 aa, synthetic construct; identical to SEQ ID NO: 1754
  VARIANT 31: note = /replace="Gln" or "Ala"
  VARIANT 52: note = /replace="Gln" or "Ser" or "Ala"
  REGION 1..98: note = MISC_FEATURE - /note="Variant residues given in the sequence have no preference with respect to those in the annotations for variant positions"
  REGION 1..98: note = source = /note="Description of Artificial Sequence: Synthetic polypeptide"

SEQ ID NO: 1810 - protein, 119 aa, synthetic construct
  VARIANT 31: note = /replace="Gln" or "Ser" or "Ala"
  VARIANT 52: note = /replace="Gln" or "Ser" or "Ala"
  VARIANT 103: note = /replace="Gln" or "Ser" or "Ala"
  VARIANT 105: note = /replace="Tyr" or "Phe" or "His"
  REGION 1..119: note = MISC_FEATURE - /note="Variant residues given in the sequence have no preference with respect to those in the annotations for variant positions"
  REGION 1..119: note = source = /note="Description of Artificial Sequence: Synthetic polypeptide"
QVQLVQSGAEVKKPGASVKVSCKASGYAFTNHLIEWVRQAPGQGLEWMGVINPGSDSTDYAQKFQGRVTMTRDTSTSTVYMELSSLRSEDTAVYYCARSLYYNSWFVYWGQGTLVTVSS

SEQ ID NO: 1811 - protein, 119 aa, synthetic construct
  VARIANT 31: note = /replace="Gln" or "Ser" or "Ala"
  VARIANT 52: note = /replace="Gln" or "Ser" or "Ala"
  VARIANT 103: note = /replace="Gln" or "Ser" or "Ala"
  VARIANT 105: note = /replace="Tyr" or "Phe" or "His"
  REGION 1..119: note = MISC_FEATURE - /note="Variant residues given in the sequence have no preference with respect to those in the annotations for variant positions"
  REGION 1..119: note = source = /note="Description of Artificial Sequence: Synthetic polypeptide"
QVQLVQSGAEVKKPGASVKVSCKASGYAFTNHLIEWVRQAPGQGLEWIGVINPGSDSTDYAQKFQGRVTMTADTSTSTVYMELSSLRSEDTAVYYCARSLYYNSWFVYWGQGTLVTVSS

SEQ ID NO: 1812 - protein, 119 aa, synthetic construct
  VARIANT 31: note = /replace="Gln" or "Ser" or "Ala"
  VARIANT 52: note = /replace="Gln" or "Ser" or "Ala"
  VARIANT 103: note = /replace="Gln" or "Ser" or "Ala"
  VARIANT 105: note = /replace="Tyr" or "Phe" or "His"
  REGION 1..119: note = MISC_FEATURE - /note="Variant residues given in the sequence have no preference with respect to those in the annotations for variant positions"
  REGION 1..119: note = source = /note="Description of Artificial Sequence: Synthetic polypeptide"
QVQLVQSGAEVKKPGASVKVSCKASGYAFTNHLIEWIRQAPGQGLEWIGVINPGSDSTDYAQKFQGRATLTADTSTSTAYMELSSLRSEDTAVYYCARSLYYNSWFVYWGQGTLVTVSS

SEQ ID NO: 1813 - protein, 119 aa, synthetic construct
  VARIANT 31: note = /replace="Gln" or "Ser" or "Ala"
  VARIANT 52: note = /replace="Gln" or "Ser" or "Ala"
  VARIANT 103: note = /replace="Gln" or "Ser" or "Ala"
  VARIANT 105: note = /replace="Tyr" or "Phe" or "His"
  REGION 1..119: note = MISC_FEATURE - /note="Variant residues given in the sequence have no preference with respect to those in the annotations for variant positions"
  REGION 1..119: note = source = /note="Description of Artificial Sequence: Synthetic polypeptide"
QVQLVQSGAEVKKPGASVKVSCKASGYAFTNHLIEWIRQAPGQGLEWIGVINPGSDSTDYAQKFQGRATLTADKSTSTAYMELSSLRSEDTAVYYCARSLYYNSWFVYWGQGTLVTVSS

SEQ ID NO: 1814 - protein, 96 aa, synthetic construct; identical to SEQ ID NO: 1762
  REGION 1..96: note = source = /note="Description of Artificial Sequence: Synthetic polypeptide"

SEQ ID NO: 1815 - protein, 12 aa, synthetic construct
  REGION 1..12: note = source = /note="Description of Artificial Sequence: Synthetic peptide"
YTFGQGTKLEIK

SEQ ID NO: 1816 - protein, 107 aa, synthetic construct; identical to SEQ ID NO: 1646
  VARIANT 28: note = /replace="Gln" or "Ser" or "Ala" or "Asp"
  VARIANT 50: note = /replace="Gln" or "Ser" or "Ala" or "Asp"
  REGION 1..107: note = MISC_FEATURE - /note="Variant residues given in the sequence have no preference with respect to those in the annotations for variant positions"
  REGION 1..107: note = source = /note="Description of Artificial Sequence: Synthetic polypeptide"

SEQ ID NO: 1817 - protein, 96 aa, synthetic construct; identical to SEQ ID NO: 1762
  VARIANT 28: note = /replace="Gln" or "Ala" or "Asp"
  VARIANT 50: note = /replace="Gln" or "Ser" or "Asp"
  REGION 1..96: note = MISC_FEATURE - /note="Variant residues given in the sequence have no preference with respect to those in the annotations for variant positions"
  REGION 1..96: note = source = /note="Description of Artificial Sequence: Synthetic polypeptide"

SEQ ID NO: 1818 - protein, 107 aa, synthetic construct
  VARIANT 28: note = /replace="Gln" or "Ser" or "Ala" or "Asp"
  VARIANT 50: note = /replace="Gln" or "Ser" or "Ala" or "Asp"
  REGION 1..107: note = MISC_FEATURE - /note="Variant residues given in the sequence have no preference with respect to those in the annotations for variant positions"
  REGION 1..107: note = source = /note="Description of Artificial Sequence: Synthetic polypeptide"
DIQMTQSPSSLSASVGDRVTITCRASENIYSYLAWYQQKPGKAPKLLIYNAKTLVEGVPSRFSGSGSGTDFTLTISSLQPEDFATYYCQHHYGTPYTFGQGTKLEIK

SEQ ID NO: 1819 - protein, 107 aa, synthetic construct
  VARIANT 28: note = /replace="Gln" or "Ser" or "Ala" or "Asp"
  VARIANT 50: note = /replace="Gln" or "Ser" or "Ala" or "Asp"
  REGION 1..107: note = MISC_FEATURE - /note="Variant residues given in the sequence have no preference with respect to those in the annotations for variant positions"
  REGION 1..107: note = source = /note="Description of Artificial Sequence: Synthetic polypeptide"
DIQMTQSPSSLSASVGDRVTITCRASENIYSYLAWYQQKPGKAPKLLVYNAKTLVEGVPSRFSGSGSGTDFTLTISSLQPEDFGTYYCQHHYGTPYTFGQGTKLEIK

SEQ ID NO: 1820 - protein, 120 aa, synthetic construct; identical to SEQ ID NO: 1019
  REGION 1..120: note = source = /note="Description of Artificial Sequence: Synthetic polypeptide"

SEQ ID NO: 1821 - protein, 120 aa, synthetic construct; identical to SEQ ID NO: 1759
  REGION 1..120: note = source = /note="Description of Artificial Sequence: Synthetic polypeptide"

SEQ ID NO: 1822 - protein, 120 aa, synthetic construct; identical to SEQ ID NO: 1760
  REGION 1..120: note = source = /note="Description of Artificial Sequence: Synthetic polypeptide"

SEQ ID NO: 1823 - protein, 120 aa, synthetic construct; identical to SEQ ID NO: 1761
  REGION 1..120: note = source = /note="Description of Artificial Sequence: Synthetic polypeptide"

SEQ ID NO: 1824 - protein, 107 aa, synthetic construct; identical to SEQ ID NO: 1024
  REGION 1..107: note = source = /note="Description of Artificial Sequence: Synthetic polypeptide"

SEQ ID NO: 1825 - protein, 107 aa, synthetic construct; identical to SEQ ID NO: 1767
  REGION 1..107: note = source = /note="Description of Artificial Sequence: Synthetic polypeptide"

SEQ ID NO: 1826 - protein, 107 aa, synthetic construct; identical to SEQ ID NO: 1768
  REGION 1..107: note = source = /note="Description of Artificial Sequence: Synthetic polypeptide"

SEQ ID NO: 1827 - protein, 119 aa, synthetic construct; identical to SEQ ID NO: 1773
  REGION 1..119: note = source = /note="Description of Artificial Sequence: Synthetic polypeptide"

SEQ ID NO: 1828 - protein, 119 aa, synthetic construct; identical to SEQ ID NO: 1029
  REGION 1..119: note = source = /note="Description of Artificial Sequence: Synthetic polypeptide"

SEQ ID NO: 1829 - protein, 119 aa, synthetic construct; identical to SEQ ID NO: 1775
  REGION 1..119: note = source = /note="Description of Artificial Sequence: Synthetic polypeptide"

SEQ ID NO: 1830 - protein, 119 aa, synthetic construct; identical to SEQ ID NO: 1776
  REGION 1..119: note = source = /note="Description of Artificial Sequence: Synthetic polypeptide"

SEQ ID NO: 1831 - protein, 107 aa, synthetic construct; identical to SEQ ID NO: 1782
  REGION 1..107: note = source = /note="Description of Artificial Sequence: Synthetic polypeptide"

SEQ ID NO: 1832 - protein, 107 aa, synthetic construct; identical to SEQ ID NO: 1034
  REGION 1..107: note = source = /note="Description of Artificial Sequence: Synthetic polypeptide"

SEQ ID NO: 1833 - protein, 120 aa, synthetic construct; identical to SEQ ID NO: 1788
  REGION 1..120: note = source = /note="Description of Artificial Sequence: Synthetic polypeptide"

SEQ ID NO: 1834 - protein, 120 aa, synthetic construct; identical to SEQ ID NO: 1789
  REGION 1..120: note = source = /note="Description of Artificial Sequence: Synthetic polypeptide"

SEQ ID NO: 1835 - protein, 120 aa, synthetic construct; identical to SEQ ID NO: 1790
  REGION 1..120: note = source = /note="Description of Artificial Sequence: Synthetic polypeptide"

SEQ ID NO: 1836 - protein, 107 aa, synthetic construct; identical to SEQ ID NO: 1782
  REGION 1..107: note = source = /note="Description of Artificial Sequence: Synthetic polypeptide"

SEQ ID NO: 1837 - protein, 107 aa, synthetic construct; identical to SEQ ID NO: 1034
  REGION 1..107: note = source = /note="Description of Artificial Sequence: Synthetic polypeptide"

SEQ ID NO: 1838 - protein, 118 aa, synthetic construct; identical to SEQ ID NO: 1795
  REGION 1..118: note = source = /note="Description of Artificial Sequence: Synthetic polypeptide"

SEQ ID NO: 1839 - protein, 118 aa, synthetic construct; identical to SEQ ID NO: 1796
  REGION 1..118: note = source = /note="Description of Artificial Sequence: Synthetic polypeptide"

SEQ ID NO: 1840 - protein, 118 aa, synthetic construct; identical to SEQ ID NO: 1797
  REGION 1..118: note = source = /note="Description of Artificial Sequence: Synthetic polypeptide"

SEQ ID NO: 1841 - protein, 118 aa, synthetic construct; identical to SEQ ID NO: 1798
  REGION 1..118: note = source = /note="Description of Artificial Sequence: Synthetic polypeptide"

SEQ ID NO: 1842 - protein, 106 aa, synthetic construct; identical to SEQ ID NO: 1803
  REGION 1..106: note = source = /note="Description of Artificial Sequence: Synthetic polypeptide"

SEQ ID NO: 1843 - protein, 106 aa, synthetic construct; identical to SEQ ID NO: 1804
  REGION 1..106: note = source = /note="Description of Artificial Sequence: Synthetic polypeptide"

SEQ ID NO: 1844 - protein, 106 aa, synthetic construct; identical to SEQ ID NO: 1805
  REGION 1..106: note = source = /note="Description of Artificial Sequence: Synthetic polypeptide"

SEQ ID NO: 1845 - protein, 119 aa, synthetic construct; identical to SEQ ID NO: 1810
  REGION 1..119: note = source = /note="Description of Artificial Sequence: Synthetic polypeptide"

SEQ ID NO: 1846 - protein, 119 aa, synthetic construct; identical to SEQ ID NO: 1811
  REGION 1..119: note = source = /note="Description of Artificial Sequence: Synthetic polypeptide"

SEQ ID NO: 1847 - protein, 119 aa, synthetic construct; identical to SEQ ID NO: 1812
  REGION 1..119: note = source = /note="Description of Artificial Sequence: Synthetic polypeptide"

SEQ ID NO: 1848 - protein, 119 aa, synthetic construct; identical to SEQ ID NO: 1813
  REGION 1..119: note = source = /note="Description of Artificial Sequence: Synthetic polypeptide"

SEQ ID NO: 1849 - protein, 107 aa, synthetic construct; identical to SEQ ID NO: 1818
  REGION 1..107: note = source = /note="Description of Artificial Sequence: Synthetic polypeptide"

SEQ ID NO: 1850 - protein, 107 aa, synthetic construct; identical to SEQ ID NO: 1819
  REGION 1..107: note = source = /note="Description of Artificial Sequence: Synthetic polypeptide"

SEQ ID NO: 1851 - protein, 5 aa, synthetic construct
  REGION 1..5: note = source = /note="Description of Artificial Sequence: Synthetic peptide"
GSGGS

SEQ ID NO: 1852 - protein, 5 aa, synthetic construct
  REGION 1..5: note = source = /note="Description of Artificial Sequence: Synthetic peptide"
GGGGS

SEQ ID NO: 1853 - protein, 4 aa, synthetic construct
  REGION 1..4: note = source = /note="Description of Artificial Sequence: Synthetic peptide"
GGGS

SEQ ID NO: 1854 - protein, 15 aa, synthetic construct
  REGION 1..15: note = source = /note="Description of Artificial Sequence: Synthetic peptide"
GGGGSGGGGSGGGGS

SEQ ID NO: 1855 - protein, 9 aa, synthetic construct
  REGION 1..9: note = source = /note="Description of Artificial Sequence: Synthetic peptide"
NLVPMVATV

1.-58. (canceled)

59. A method of treatment for cancer in a patient comprising administering an anti-TIGIT antibody, an anti-PVRIG antibody, and either an anti-PD-1 antibody or an anti-PD-L1 antibody; wherein the anti-TIGIT antibody comprises:
(i) a heavy variable domain having at least about 75% or at least about 80% sequence identity to a heavy chain variable domain from an anti-TIGIT antibody selected from the group consisting of CPA.9.083.H4(S241P), CPA.9.086.H4(S241P), CHA.9.547.7.H4(S241P) and CHA.9.547.13.H4(S241P); and
(ii) a light variable domain having at least about 75% or at least about 80% sequence identity to a light chain variable domain from the anti-TIGIT antibody in (i).

60. The method of claim 59, wherein the anti-TIGIT antibody comprises:
(i) a heavy variable domain having at least about 80% sequence identity to the heavy chain variable domain from an anti-TIGIT antibody selected from the group consisting of CPA.9.083.H4(S241P), CPA.9.086.H4(S241P), CHA.9.547.7.H4(S241P) and CHA.9.547.13.H4(S241P); and
(ii) a light variable domain having at least about 80% sequence identity to the light chain variable domain from the anti-TIGIT antibody in (i).

61. The method of claim 59, wherein the anti-TIGIT antibody comprises:
(i) a heavy variable domain having at least about 90% sequence identity to the heavy chain variable domain from an anti-TIGIT antibody selected from the group consisting of CPA.9.083.H4(S241P), CPA.9.086.H4(S241P), CHA.9.547.7.H4(S241P) and CHA.9.547.13.H4(S241P); and
(ii) a light variable domain having at least about 90% sequence identity to the light chain variable domain from the anti-TIGIT antibody in (i).

62. The method of claim 59, wherein the anti-PVRIG antibody comprises:
(i) a heavy variable domain having at least about 75% or at least about 80% sequence identity to a heavy chain variable domain from an anti-PVRIG antibody selected from the group consisting of CHA.7.518.1.H4(S241P) and CHA.7.538.1.2.H4(S241P); and
(ii) a light variable domain having at least about 75% or at least about 80% sequence identity to a light chain variable domain from the anti-PVRIG antibody in (i).

63. The method of claim 62, wherein the anti-PVRIG antibody comprises:
(i) a heavy variable domain having at least about 80% sequence identity to the heavy chain variable domain from an anti-PVRIG antibody selected from the group consisting of CHA.7.518.1.H4(S241P) and CHA.7.538.1.2.H4(S241P); and
(ii) a light variable domain having at least about 80% sequence identity to the light chain variable domain from the anti-PVRIG antibody in (i).

64. The method of claim 62, wherein the anti-PVRIG antibody comprises:
(i) a heavy variable domain having at least about 90% sequence identity to the heavy chain variable domain from an anti-PVRIG antibody selected from the group consisting of CHA.7.518.1.H4(S241P) and CHA.7.538.1.2.H4(S241P); and
(ii) a light variable domain having at least about 90% sequence identity to the light chain variable domain from the anti-PVRIG antibody in (i).

65. The method of claim 59, wherein the anti-PD-1 antibody is selected from the group consisting of pembrolizumab, cemiplimab, and nivolumab.

66. The method of claim 59, wherein the anti-PD-L1 antibody is selected from the group consisting of atezolizumab, avelumab, and durvalumab.

67. The method of claim 59, wherein the antibodies are administered simultaneously.

68. The method of claim 59, wherein the antibodies are administered as separate infusions or as one infusion of a mixture of the antibodies.

69. The method of claim 59, wherein the antibodies are administered sequentially.

70. The method of claim 59, wherein the antibodies are administered sequentially over a period of hours or days.

71. The method of claim 59, wherein the cancer is selected from the group consisting of squamous cell cancer, lung cancer (including small-cell lung cancer, non-small cell lung cancer, adenocarcinoma of the lung, and squamous carcinoma of the lung), cancer of the peritoneum, hepatocellular cancer, gastric or stomach cancer (including gastrointestinal cancer), esophageal cancer, melanoma, non melanoma skin cancer (squamous and basal cell carcinoma), testicular germ cell tumors, MSI-high cancer, mesothelioma, merkel cell cancer, pancreatic cancer, glioma, glioblastoma, cervical cancer, ovarian cancer, liver cancer, bladder cancer, hepatoma, breast cancer, colon cancer, colorectal cancer, endometrial or uterine carcinoma, salivary gland carcinoma, kidney or renal cancer, prostate cancer, vulval cancer, thyroid cancer, hepatic carcinoma and various types of head and neck cancer, larynx cancer, oral cavity cancer, urothelial cancer, KRAS mutant tumors, Myelodysplastic syndromes (MDS), as well as B-cell malignancies, B-cell lymphoma (NHL or HL) (including low grade/follicular non-Hodgkin's lymphoma (NHL); small lymphocytic (SL) NHL; intermediate grade/follicular NHL; intermediate grade diffuse NHL; high grade immunoblastic NHL; high grade lymphoblastic NHL; high grade small non-cleaved cell NHL; bulky disease NHL; mantle cell lymphoma; AIDS-related lymphoma; and Waldenstrom's Macroglobulinemia); chronic lymphocytic leukemia (CLL); acute lymphoblastic leukemia (ALL); Acute myeloid leukemia (AML), T cell Acute Lymphoblastic Leukemia (T-ALL), Diffuse Large B cell lymphoma, Hairy cell leukemia; chronic myeloblastic leukemia; adult T-cell leukemia/lymphoma; myeloma; multiple myeloma and post-transplant lymphoproliferative disorder (PTLD), lymphoid malignancies, abnormal vascular proliferation associated with phakomatoses, edema (such as that associated with brain tumors), and Meigs' syndrome, rectal cancer, renal cell cancer, soft-tissue sarcoma, Kaposi's sarcoma, carcinoid carcinoma, and ovarian early or advanced (including metastatic).

72. The method of claim 59, wherein the cancer is selected from the group consisting of ovarian cancer, triple negative breast cancer, stomach (gastric) cancer, lung cancer (small cell lung, non-small cell lung), Merkel Cells cancer, MSI-high cancer, KRAS mutant tumors, adult T-cell leukemia/lymphoma, and Myelodysplastic syndromes (MDS).

73. The method of claim 59, wherein the antibodies are provided in an administration kit with dosage units of each antibody, either packaged separately in individual dosage units, or together, as a mixture of antibodies as a single dosage unit.
